United States Patent Application Publication US 2022/0218752 A1 - sequence listing, part 2

SEQ ID NO: 11187 - protein, 172 aa, Artificial Sequence; identical to SEQ ID NO: 11186
  Synthetic

SEQ ID NO: 11188 - protein, 175 aa, Artificial Sequence
  Synthetic
SEADKVRKELDDVRRRVKKALDDIRRELEKLVKEVEDALRDHERSNEELVREVREKLKDDKDVERTVEKSHRDSRRLVEEIKREVEKLRERLERVLRKIEEDVKRLKEKLERLIEEGNVDDRVVEEIRDMMRKLKRELERIVEEAKKVVEDLKRRLEEVSRRSADLVRRLKERAR

SEQ ID NO: 11189 - protein, 175 aa, Artificial Sequence; identical to SEQ ID NO: 11188
  Synthetic

SEQ ID NO: 11190 - protein, 175 aa, Artificial Sequence
  Synthetic
SDLERVKKDLEDVVRRVEEVLREHKRTNDEIIREIERLIEELRKENERLAREVRDKLKDVDDVRRAVKKSHEDVREVLRRLKEEADESHEKSKEVIKEIEKRVKKLLEDLDRLIKEGRVDERVVDEIRKVVKELEERLRRLSEESRKLVKDIKEKLDKLAEDSRRLVEKLERDAK

SEQ ID NO: 11191 - protein, 175 aa, Artificial Sequence; identical to SEQ ID NO: 11190
  Synthetic

SEQ ID NO: 11192 - protein, 182 aa, Artificial Sequence
  Synthetic
REFEELVERVKRVVEELTRRLRETSEETKTVLEKLRKELEEASRRIEDVLRRLTEKIRKDGRGGELKEEVERELKRLRDESEELVRRVEEVVDRLRRRHEELKKRAEDVLRKLREELKEMRDRGKGTEELEETLERLVEAIRDALRKDEETMRRVAEAIRRLLEDHRRSLEEVLEKIRDALR

SEQ ID NO: 11193 - protein, 182 aa, Artificial Sequence; identical to SEQ ID NO: 11192
  Synthetic

SEQ ID NO: 11194 - protein, 182 aa, Artificial Sequence
  Synthetic
SEAEKIVEDIRRVIRELKEKLKKTSEDTEDTVRKLSRRLRELAKRSAELVERVTREIRKDGPGGELVRKVRELLKKSSKEIEDLVREVEEKVEELKRRHDKVVKEAEEVLRELEKRVDEVRKKGLGTEELEETLRRVAEEIRRLLEEDRETLRRVERKIREMLKELEEINRRLIKEVDEEVK

SEQ ID NO: 11195 - protein, 182 aa, Artificial Sequence; identical to SEQ ID NO: 11194
  Synthetic

SEQ ID NO: 11196 - protein, 182 aa, Artificial Sequence
  Synthetic
DEVEEIVRRIEEVLKDLRRRLETLARESRDLVRKIKEELRRHSDESRRLLERIKERIRRDGSGGELVRDVERLLKESSDTLEELKRRVRELLERSSKKVEDLVREAEKVLKKLEEDVKRMRDKGKGTDELKKEADRVKKEIRDMLRKLKKINDDLIREIEEALKDNERTNREIIRRIEEELR

SEQ ID NO: 11197 - protein, 182 aa, Artificial Sequence; identical to SEQ ID NO: 11196
  Synthetic

SEQ ID NO: 11198 - protein, 182 aa, Artificial Sequence
  Synthetic
DEAEKIVRDIEETVRRLARELEKHSEDSRRLVERIKEELTRHSKKVADVVRELKKRIKRDGSGGELVEDAKRVLRTLEETIEKLKRDVERLVKESSDSIRELEERVRKVLEDLRREVEEARRRGKGTEELEKRMRRLVKEIERMLEENKRTNEELVREIEEALKKNEETLRRLKREIEEALR

SEQ ID NO: 11199 - protein, 182 aa, Artificial Sequence; identical to SEQ ID NO: 11198
  Synthetic

SEQ ID NO: 11200 - protein, 175 aa, Artificial Sequence
  Synthetic
SEAEELVKDAERVVEELERRLRKVSEDIDREVKKIKRELDEHSKRVKETVDDVRRRNLPEEDVRRIVEELKDSLEKLREKLERKREEIRRRSEKLKREADKVLEELKKKLDEIRKKGLGTEELKKRVEDLIRTIKELIKRHDDSVKEVEKRIREMLERNRKSVEEVIEELKRTSK

SEQ ID NO: 11201 - protein, 175 aa, Artificial Sequence; identical to SEQ ID NO: 11200
  Synthetic

SEQ ID NO: 11202 - protein, 182 aa, Artificial Sequence
  Synthetic
SELEELVKEVKELVDRSKEELKKLSEELKKLLDDLIKRIEDLSRRSKRLVEELRRRVEERGRRKDLLRRAREELRKSDEELDEIEKRAEKRVRDSKRRVREIHKESERRLREIRREIEERVRGEEEMKRVEEELKRLREEDREAVERHDESIRKLREDLRRAVETHKKSNRDLLREVEETVR

SEQ ID NO: 11203 - protein, 182 aa, Artificial Sequence; identical to SEQ ID NO: 11202
  Synthetic

SEQ ID NO: 11204 - protein, 179 aa, Artificial Sequence
  Synthetic
DEVEELIRKIEDLLRRIEEKVTKAIRKSERLLEEIKKKIKEMIDKSERLVEEVERRTRNSDKDKEEVVRRLKKEAEDSHRELEDLIRRVEEELRRSHDELRRLVEAVRKEIKDLEREVEESRASEDVKRVLKKVADDVERLLRDLERRNRKVREDVKRVLEELRKSNERSIRRIDETLR

SEQ ID NO: 11205 - protein, 179 aa, Artificial Sequence; identical to SEQ ID NO: 11204
  Synthetic

SEQ ID NO: 11206 - protein, 179 aa, Artificial Sequence
  Synthetic
REIEEIIKRARELLEEVEEEWRRLIEKSRRLLEELKKRWDKLIEKSKDLLRKIEKTTKDSDKDKEEVVRRLEEEAKKSHEEVKKAVDDSRKETKESHEEVKRVIEESKKRTEELKERLERNNIDDELRKILKRVEDENRRLVEEVERSNRRSMEENERLAEEVRRSNKDVIDKIRERLR

SEQ ID NO: 11207 - protein, 179 aa, Artificial Sequence; identical to SEQ ID NO: 11206
  Synthetic

SEQ ID NO: 11208 - protein, 184 aa, Artificial Sequence
  Synthetic
DELERLSESVKKAERRIERLNEELNERVKEVTKAIDDLNKRLNDESKRVKEELRKVLARSDREEVERKLRKLEEELDRENKRLNDESEKLKRELEERNKKVNERSKRLVERLRRVLEEIRRRKVPEEVIKRVLDDVERAVDEVRKLIEDVLKEHEDILREVKKELDKAIERHKEILKRVREDIK

SEQ ID NO: 11209 - protein, 184 aa, Artificial Sequence; identical to SEQ ID NO: 11208
  Synthetic

SEQ ID NO: 11210 - protein, 184 aa, Artificial Sequence
  Synthetic
SVLEDLARKVERVIREAKKVNEELNRRSEEVRRRADEVVADLNRESKKVDDELKKVLARSTREEVARDLERLRRELEELNKRLNDRIEEIKERLERLNERVNRETDELVRELKKRLKEVEDRQVPEEVARRVVEELKKVLKEIEDEIRRVIERHKEALDEVRRLVKELKDRHDKILREVREKIR

SEQ ID NO: 11211 - protein, 184 aa, Artificial Sequence; identical to SEQ ID NO: 11210
  Synthetic

SEQ ID NO: 11212 - protein, 184 aa, Artificial Sequence
  Synthetic
SSEDRLRETVEDVIRRARDANRELNKASRDVEEESKKLNKELNDRSRKVERDLEEVLRRSTDEELARRLEELRKELRKLNEDANRRSKKLIEELREKNKEINKRTDKVVKELKRKLEEVEKRKVPEEVIERLIRDLRRVLEEIKREIEEALRDHERVLKENEDMVREILRRHEEILKRMTDEIR

SEQ ID NO: 11213 - protein, 184 aa, Artificial Sequence; identical to SEQ ID NO: 11212
  Synthetic

SEQ ID NO: 11214 - protein, 184 aa, Artificial Sequence
  Synthetic
SVLERVADELRKVEEAIDRLNKELNDAVERVERESRRVNKELNDASERVERELDEVLKRTRRKEVADRLEKLKEDLRRTNEDVNRRSKELIDRLREENKRVNEESERIKDKIRRDLEDIKRRKVPEEVAKELIDRIRKLLDDIRRKLEEVLKRHEEVLKRNEDTIRKVLKRHEEILEKVKRDIK

SEQ ID NO: 11215 - protein, 184 aa, Artificial Sequence; identical to SEQ ID NO: 11214
  Synthetic

SEQ ID NO: 11216 - protein, 184 aa, Artificial Sequence
  Synthetic
SSKERLREAVERVERESDKVNKELNDKSRRVTEELRKLAEELNRRSKEVEEELDKLLARSTRKEVADRLEDLKRRLRELNKDLNRRLRELEEELRRLNEKLKRESEELKERLRRLLEEVEKRDVPEEVIRRLIEELDRLLEENDRRIKKAIEDHKRILEKAEREVREILRRHEKILEDVREEIR

SEQ ID NO: 11217 - protein, 184 aa, Artificial Sequence; identical to SEQ ID NO: 11216
  Synthetic

SEQ ID NO: 11218 - protein, 171 aa, Artificial Sequence
  Synthetic
DEEEDLRRAIERVIETVRRLVERVEEESKRVADELRKLTKRLEEVVRKVDEDARKEVKKKDLLDKVRKELEEILRDLRRHTEELERESKKSIDELRELLKTLRRELEEIRKRGERVEDVKRRLEELLKRAKEVLDELIKRHRDLLRRHEEKVRRLIKRIEDLLRELSKKAK

SEQ ID NO: 11219 - protein, 171 aa, Artificial Sequence; identical to SEQ ID NO: 11218
  Synthetic

SEQ ID NO: 11220 - protein, 171 aa, Artificial Sequence
  Synthetic
SKEEELEKIVRKIREDLRRAVKEVEDESKRVLESTKKALDTIRRVSEKVIEDLRRELRDEEVLKDLERRSKETIKKLEEHVKRSEEESRDSIRELRRLLEELERRLEDLKRRGEPVDELVRRLEELLKELRKRLEDLIRRHEDINRRNHELIRRAIEEHRRLLREAREREK

SEQ ID NO: 11221 - protein, 171 aa, Artificial Sequence; identical to SEQ ID NO: 11220
  Synthetic

SEQ ID NO: 11222 - protein, 179 aa, Artificial Sequence
  Synthetic
DEIEELIKKLREDLDRSRREVEKNSEDLKELIKRSEERIEKLIEDLERMVDDARRKNSKDSTLKETIKKLAEELRRELKKLHEDTKRKLDESRERTERIHKRTEEILRDLRDKLKRIDVDEKLLKKLEDVIDDVRRRDEDVVRKNEESLKRIEKRDEELIRKIEEVIRRAERKVDEVMR

SEQ ID NO: 11223 - protein, 179 aa, Artificial Sequence; identical to SEQ ID NO: 11222
  Synthetic

SEQ ID NO: 11224 - protein, 179 aa, Artificial Sequence
  Synthetic
SKIEELIKELEKLSRTNEELVKRVLEELTRLVEESAKRIEDIIRRLKEVVDKARRENSRDERLLREVEKELRRVEEELEELHRRTKKKLDDVRKEAEDSLRKSKDDMRKVEEELRRTDVDKKLLDKIKKAIEDLERENERALKELEKRLRELLRTDRELIRKIEEEIKKLRREVEEVLR

SEQ ID NO: 11225 - protein, 179 aa, Artificial Sequence; identical to SEQ ID NO: 11224
  Synthetic

SEQ ID NO: 11226 - protein, 184 aa, Artificial Sequence
  Synthetic
SIKERLTEVLKRLAEEIRKVIEENKRTVDRAREEVERVIRKNREVLKRIKERADEVIKRISDERLVREIEDRLEKLKKTSEDLVRDVERIVEEMERSSRELEKDIRRILDELAKKVEKVKKDGSDERVVEELIREAKKIVEDIVRRVKRHSREVERIVEEIRRRAEEHIERLKRSLEEVEKKVD

SEQ ID NO: 11227 - protein, 184 aa, Artificial Sequence; identical to SEQ ID NO: 11226
  Synthetic

SEQ ID NO: 11228 - protein, 184 aa, Artificial Sequence
  Synthetic
RIMEKLEEVLKELRKKIKKLNKDNEETVRRIKKEVDKVIKKNRDVNERIRKRLEEVISRISDERLVRDIERLARENSRTSEELEREVRKIVREAEESSKRLIEKNEDLLRRLTEEVKRVKDRGESEEVVEKLIEDMERVVAESAKENKKHSDDVKRILDEIRRKAEDHIRKTEELLRRIEERTR

SEQ ID NO: 11229 - protein, 184 aa, Artificial Sequence; identical to SEQ ID NO: 11228
  Synthetic

SEQ ID NO: 11230 - protein, 184 aa, Artificial Sequence
  Synthetic
SIKEKLTEELERLAKRIREANEDNKRTVEEVEKRIREVIKKNRDSNKEIKDDVERVLSRIDDEEVVRKIKELVERNSETSERLRRKVEEELKRLRESSRKLIEDNKKLLEDLRREVEEAKRRGEDEEVVERLLKKMREAVKKSEDENREHSERVKRIIEKIAREAEEHSKRTKELLDRIREEVR

SEQ ID NO: 11231 - protein, 184 aa, Artificial Sequence; identical to SEQ ID NO: 11230
  Synthetic

SEQ ID NO: 11232 - protein, 184 aa, Artificial Sequence
  Synthetic
RVDEDLKRVLDELKKRVEDLNEENKKTVEDISRRVREVIKRNEDMLREVKKRAREAISRISDERLVRRIEELLKRLEETSRKLARDVEEIVKDIERSSEELIRDNERLVRELAREVEEVSRRGESEEVVRELIKKMRDVVRKSEKDNKDHSERVKRILKRIEERAREHTRRLEEVLRKVEEDVR

SEQ ID NO: 11233 - protein, 184 aa, Artificial Sequence; identical to SEQ ID NO: 11232
  Synthetic

SEQ ID NO: 11234 - protein, 183 aa, Artificial Sequence
  Synthetic
RVKEKLREVLERLEREIRKILKDNKETVKRIEEEARRAVEKNKEALKRLEDRVRELLEDKDQEDRKKVKDVVDELRKSSKKLTDKIRKILEDIKKTSEDLERRVKEVLDKLREDVKRIEEKPVDEEKVERLAEELRKIVRKIIEDVRKHSEDVRKILEDVKKEVDDHVREMEEIVKRLEDEIR

SEQ ID NO: 11235 - protein, 183 aa, Artificial Sequence; identical to SEQ ID NO: 11234
  Synthetic

SEQ ID NO: 11236 - protein, 180 aa, Artificial Sequence
  Synthetic
SELEEIVKEIKRILDEHEKKVRRNSEEMKRIVDRHAERVEKLIREIEELLRRLDELVKRGEVDEETAERIKDRIRKLLEEAKKHSKRIKDELDRSNKELDDHSEKVKREIDKLVKDVRRKGVEGEEDLERMAREIKDRLDKIDEENKKSSEELKRELDRLDEKLRDVARRIMEAIDERTR

SEQ ID NO: 11237 - protein, 180 aa, Artificial Sequence; identical to SEQ ID NO: 11236
  Synthetic

SEQ ID NO: 11238 - protein, 180 aa, Artificial Sequence
  Synthetic
DELREIVRRIEKILEDHARTIEEVIERIRDILRKHEKLVEEVLRRIEKLLKELEEMVRRGELDEETVRRVEREIEDLLRRAKEHSEEVKKRIEELLERLRRHSRDVERAIDELVKKVRERGVEGTEDLERMAERVKRELERLNKKAEDALREVKRALDDLDRDLKRVLEEIKERIRRATT

SEQ ID NO: 11239 - protein, 180 aa, Artificial Sequence; identical to SEQ ID NO: 11238
  Synthetic

SEQ ID NO: 11240 - protein, 180 aa, Artificial Sequence
  Synthetic
SELERILTEIEKRIEEHERRIKENSKRMKEIVDDHERKVEEVLRRIRKLLRDLEEMVKRGELDEDTAEKVKRDIDKLLEEARRHSERVKRELDKSNEDLRRHSKKVIDDIRRLVEEVRRRGVERREDLEKVARDVEKRLEDANRENEKSSRELKRRLDELDKKLEEEARRIKKAIDDKTR

SEQ ID NO: 11241 - protein, 180 aa, Artificial Sequence; identical to SEQ ID NO: 11240
  Synthetic

SEQ ID NO: 11242 - protein, 180 aa, Artificial Sequence
  Synthetic
SEVDEVAKEIRRILEEHEEEIRRNSEEAKRILDEHREKLKRNSDDMRRIVKEIEDMRRRGELDEETAKKIKEELERSNRKLEKHSEDVIRRLRKSNTDLKRHSEEVKKEIEKLVKRLEDKGVEREEDLREVAERVKKDLDRLNRENDESSKEIEKDLKRLDDRNRDVSEKLKKEIDELTK

SEQ ID NO: 11243 - protein, 180 aa, Artificial Sequence; identical to SEQ ID NO: 11242
  Synthetic

SEQ ID NO: 11244 - protein, 180 aa, Artificial Sequence
  Synthetic
DRLREIVKRIRDILKEHEDRIRENSKRARDILREHKRKIEEVLRRIEKLVEDLERLKRRGELDEETAKKVKEDIRRLVRTVEEHSRRVIEELDRSNDELRKHSEDVKREIEKLVEDVEREGVEGEEDLRRAAEEVKKKLDELNEENERSSEDVKRTLKKLNDELREKVRRVMERIDEAVR

SEQ ID NO: 11245 - protein, 180 aa, Artificial Sequence; identical to SEQ ID NO: 11244
  Synthetic

SEQ ID NO: 11246 - protein, 180 aa, Artificial Sequence
  Synthetic
DEVEDVLRKIEKILDDHRKRIEKNSRDMARIIDEHRRKVEENSREMKKLVDDLKKAVDRGEADEETAEDVKRKLEKSNRELEKHSEEVKRRLDESNEDLRRHSEEVKERIERLVKKLREDGVEREEELKEVADRVKEKLDRLNRENEKSSEELKRELDKINDENRETSERLKREIDETTR

SEQ ID NO: 11247 - protein, 180 aa, Artificial Sequence; identical to SEQ ID NO: 11246
  Synthetic

SEQ ID NO: 11248 - protein, 180 aa, Artificial Sequence
  Synthetic
DELREVVKTIEEILRDHERKVRDNSRRMKEIIKRVKEELERVIKEAKELVERLKEAVRRGEVDEDTARKIKKELRDLLRELKKRLEEIKKRLDESNDRLRRHSEEVKERIDRLVDKVRRDGVEREEDLRKMAEDVKRALDKINRDNEESSRRLKKELDDVLRKVEEVIRRLEEEIDRLTT

SEQ ID NO: 11249 - protein, 180 aa, Artificial Sequence; identical to SEQ ID NO: 11248
  Synthetic

SEQ ID NO: 11250 - protein, 180 aa, Artificial Sequence
  Synthetic
SELEKIEEDIRRILKEHKDTVRKNSEDIDRSVKEVKERIDKILKEIDDLLKELRELVERGELDERTVEEVKRRIEELLREVEKLSEKHKRDLDRSNDELRKHSEEVKKEIDDLLEEVERRGVEKREDLERVVREVKKELDDINRENRKSSEEAKKKNDDVLAELEKRIREIKRRIDEDAT

SEQ ID NO: 11251 - protein, 180 aa, Artificial Sequence; identical to SEQ ID NO: 11250
  Synthetic

SEQ ID NO: 11252 - protein, 180 aa, Artificial Sequence
  Synthetic
SDLEKLVEEIKRLLKELKERVTKNSEDMKREVERHKELVKKLKKRIEDLLRELEDAVRKGELDEKKVKELKDEIRKLVKELRDHSREVKKRLDDSNRKVEEEVRKLKEDIDKLVKEVRDKGVEKREDLERVVEEVKKEIDKIVEENRDSSRKLKERLDEANEELERRVEEIERRIDEKAR

SEQ ID NO: 11253 - protein, 180 aa, Artificial Sequence; identical to SEQ ID NO: 11252
  Synthetic

SEQ ID NO: 11254 - protein, 180 aa, Artificial Sequence
  Synthetic
DELREIVTRADETLKRVADKIEENSRRMEEIVREHERKVRELLKRIEKLVRDLSAMVRRGELDEESLKRLKDEIEKLLEEAERHSRDVKRKLDESNKRLEDDSRRHEEDLDRLVTEVEKRGVEGEEDLRRVVKRVKETNRRLLEKNKDSSRKLKKRLDEANKTLADALEEVKRRIDERRK

SEQ ID NO: 11255 - protein, 180 aa, Artificial Sequence; identical to SEQ ID NO: 11254
  Synthetic

SEQ ID NO: 11256 - protein, 180 aa, Artificial Sequence
  Synthetic
DELDEIVKRAKETVEKVKREVDANSKDIERILREHRKKVDKNSKDMEDLVRKLEELVRRGELDEETAKDVKRRLDESNDRVRRHSDEVKKKLDKSNEELRRKSDEHKKDLDRLLDEVRRRGVEREDELREAVERLERENRKVLEENRRSSEKVKRDLDRVNRENEEVSERLKKRIDEAAT

SEQ ID NO: 11257 - protein, 180 aa, Artificial Sequence; identical to SEQ ID NO: 11256
  Synthetic

SEQ ID NO: 11258 - protein, 174 aa, Artificial Sequence
  Synthetic
SEIEKIIKELDDLVKEDEDTIRRLEEELRELLKEIDREAKKSDEELEKTLEELAKIARDGKLDEELLERVERTLEKSERRMRRLKEELKRELDRIREDLERSKRDLDRKIKKLLDEIDDEELRRVLERVAEDSKRTLDRLERVLKEVERRVDEALKRNKTVLDKVREDVKRLKD

SEQ ID NO: 11259 - protein, 174 aa, Artificial Sequence; identical to SEQ ID NO: 11258
  Synthetic

SEQ ID NO: 11260 - protein, 180 aa, Artificial Sequence
  Synthetic
REIEEMIKRNEKLLEDDKRKVKRIIEKLDKVLEDDRKRAEDLIRKLEKVAEEIARLRDKVEERDVARKIKELKDEVEKLVRESKKLNEELREEVRRMKEESKELIKESHKEVRDVERKLKVEELLDTLRKVNERVARESEKTIRELEKVLERVNRESKKTIEEVEKALKEVADRVTEVRR

SEQ ID NO: 11261 - protein, 180 aa, Artificial Sequence; identical to SEQ ID NO: 11260
  Synthetic

SEQ ID NO: 11262 - protein, 180 aa, Artificial Sequence
  Synthetic
SEIEKLIKENKDLLEEDKRRVEEVIEKLERVIEEDKRRVDEAIKRLDDVAREIERLRKDSDDKDVERDIRRLEKEVREVVEKSKDLIRRLKEEVERVERTSRELIKESHKKVREAKERLKDEDLLRRLERVNEEVARRSEDTIRRLREVLKKIEDDSRRTIDELREVLKRVKTRVTEVRR

SEQ ID NO: 11263 - protein, 180 aa, Artificial Sequence; identical to SEQ ID NO: 11262
  Synthetic

SEQ ID NO: 11264 - protein, 180 aa, Artificial Sequence
  Synthetic
DDIERLIKRNKDLLDRIREEARKLIERLKKVLEDDRRKVERAIERLEEVVDEVRKLKKDTDDKDVERLLERLKEEVKKIEEESKKLIDDLRKEVEDLVKRIEESIKTSHDEVREVERRLRNEEVLRKLKKANEDVEREVRKMIEEVRRVLRKVEEDSKRTIKKLKDVLKKVAEEMEKVRR

SEQ ID NO: 11265 - protein, 180 aa, Artificial Sequence; identical to SEQ ID NO: 11264
  Synthetic

SEQ ID NO: 11266 - protein, 180 aa, Artificial Sequence
  Synthetic
DEVEEAIKELEDALRKDREAVERMIRDLERLADEDRREVEDHVKKIEELIAAVERMSRDVDEKDLRRTLKELEDSSRELVERSKDINRRLTEKVKELLERSKELNERLKRKIEDIERKLDKREVLEKLKEVLKRVEKASRKTNEDVKRVLDEVRRISEETNRRNERVVEEAKERVERVAK

SEQ ID NO: 11267 - protein, 180 aa, Artificial Sequence; identical to SEQ ID NO: 11266
  Synthetic

SEQ ID NO: 11268 - protein, 179 aa, Artificial Sequence
  Synthetic
SEVDEVIKRLEELVERHRRKVEEVIRRLEKLAEDHERKVRELEKRLRELIKRIEELARRDGPREEKVRDVRRKLRTLLKELRDTTEELKKTIRELEKELNETTKKIVDEIRRLRERVNVTSRDFDRLEDVARRVKEDLERTDEEVRRVAEEVRKRVEKTTRDVERVVREVERAIEERRR

SEQ ID NO: 11269 - protein, 179 aa, Artificial Sequence; identical to SEQ ID NO: 11268
  Synthetic

SEQ ID NO: 11270 - protein, 179 aa, Artificial Sequence
  Synthetic
DEAREVIKTLEKLLEEHERRVREVIKRLEELIKRHEDRVREVIETLKRLLEEAEKIVRRDGPSDKTVKKLRDDLEEIRKELNKTTKTIKEDLDRTIKELDEITEDIKRKLDDLRRRINVTSEDMRRLEEVIRKVKEALKRTNDRLREVVDEVKKRLDKTDEDATRVVEEVKKRIDEAAK

SEQ ID NO: 11271 - protein, 179 aa, Artificial Sequence; identical to SEQ ID NO: 11270
  Synthetic

SEQ ID NO: 11272 - protein, 179 aa, Artificial Sequence
  Synthetic
DEVETVIRRLEELIREHKEKVDRIIKELEKLLRKHEEKVKKVIEELRRLAKEAADIVRRDGPSEEVVDRLRRRLEEILKDLERHSEDVKRRLREVLKELNDETKRLKDDLRRTRKDANVRSRDMERLERVIRKVEEDLDRTNREVEEVIRRVEEEVERLDREAEEVVRDVKEKIDRLKK

SEQ ID NO: 11273 - protein, 179 aa, Artificial Sequence; identical to SEQ ID NO: 11272
  Synthetic

SEQ ID NO: 11274 - protein, 179 aa, Artificial Sequence
  Synthetic
SEAEKVIKELRDIVKRNDEVVKEIIRRLEELVKEHKRLVEEIIKRLRELLKRIEEVVRRDGPSEDKVEKVERDIERLLEELERHSRRVEEELKRLLEELEKHARESKREIKEREDKINVTSEDLKRLKDVLDEVIKKTDELLREVERKAREVTKRLRDLDRRVKEVADEVRRRIREATK

SEQ ID NO: 11275 - protein, 179 aa, Artificial Sequence; identical to SEQ ID NO: 11274
  Synthetic

SEQ ID NO: 11276 - protein, 180 aa, Artificial Sequence
  Synthetic
EEEERVKEFLDRVDTEDKKLVEELRKVVERVKRENEKLIKESEDMSKKVEDDARRLIAELRREVDETVMREIEEEVRRLKEKNERLIEKSRRDSRRLEEEVRKVIDKSRKDITKIKREVEEEPADKEVVRKLEEYLRRSRKLVDELKKKLRELLERSREKVERSKEELKRILEEVRKKAK

SEQ ID NO: 11277 - protein, 180 aa, Artificial Sequence; identical to SEQ ID NO: 11276
  Synthetic

SEQ ID NO: 11278 - protein, 185 aa, Artificial Sequence
  Synthetic
SVSERLRRVLERVAREVKRLIDEDRKVNEEAEREVRKLIKKDEDALKRVAEEVERLIREASDDDKLIREIEEILKKLAEDSRKVVEESKKVLDDINKESEDVVKESEDTLRRAAEELKEVERRGESEEIIEELIRRLEEIVKRLEEKHRTTVKKIEDIIRELKKTHDKTIEDLRRIIEEIEERVR

SEQ ID NO: 11279 - protein, 185 aa, Artificial Sequence; identical to SEQ ID NO: 11278
  Synthetic

SEQ ID NO: 11280 - protein, 181 aa, Artificial Sequence
  Synthetic
RVREELRKVLKRAAEAVERVLRKNEEVLRRAEERIRRLLEENEKSLEKVERDVTRILEGGIDSREVTELLRRLRKSSDDLKRRLRKVLEDIERSSRDLVRRVRKLLEELERRVREIEKKPVDEEKVKKLIREIEEVIDRLRRESEKHIEEIKEIITRLDKEVKDHDERLKREVDKLEERAR

SEQ ID NO: 11281 - protein, 181 aa, Artificial Sequence; identical to SEQ ID NO: 11280
  Synthetic

SEQ ID NO: 11282 - protein, 181 aa, Artificial Sequence
  Synthetic
SVEERLRKVLEEVRRLLEKIIKDNREVLKRAEEKVRELIKRDKDVLDRIAEEVERLKEKGIDKKKVDDLLEDLRRESKEVIEETEDVLRRIKDSSEKLVRELEKLLEDIERKVRDLERKPVDEEKVDRLIEELKKLIDDAREKNERHIEEIERIIDDLRRKHEETARRLKEAIDRLREEAQ

SEQ ID NO: 11283 - protein, 181 aa, Artificial Sequence; identical to SEQ ID NO: 11282
  Synthetic

SEQ ID NO: 11284 - protein, 181 aa, Artificial Sequence
  Synthetic
DKEERIERVLKRVEEELKKLKERIEEVLKKVEDMVRKNLEEIRKVSEDHERTVREIRKRGDITDELVDKLREENERVEEAVRRSVEEAKRELEKVETDVKRLEEEVKRTLDEVRKRVKDTGDEKVVEEIIKELERLLEDLKRRADELIKRLEKLVEEHHRKVEELVRRLEESLDKVRRDAK

SEQ ID NO: 11285 - protein, 181 aa, Artificial Sequence; identical to SEQ ID NO: 11284
  Synthetic

SEQ ID NO: 11286 - protein, 177 aa, Artificial Sequence
  Synthetic
SEDEKVKRVVEKVKEESDRLNEELKRVVDEVRKELERLIEKIKRSVERMDRTVRELLKRISDRKTLEEIREEVERAKRRNEEVIERMRRTLEKLERDVRDVLRRDRETLERLRKEVERDGADDRVVEKLKKALDESRKTHKKLIDDLRRALEELEKRVEDLNRENERLLDEIKKRVD

SEQ ID NO: 11287 - protein, 177 aa, Artificial Sequence; identical to SEQ ID NO: 11286
  Synthetic

SEQ ID NO: 11288 - protein, 181 aa, Artificial Sequence
  Synthetic
DVERKIEEVVRDVKRELDRLLEENRRSVERVERALDKLLEDSRRVVEEVKKALDDLRRRGLDERTIRELKKEIEELHKRNEKLVRELKKEIRDLLRENEERIRKLKREIDKILEELKRDKVPETDVKKIIEDLRRLVREVEEHSRRTNRRLEELVKDLARHAKRSIDRLKELVDRARERAR

SEQ ID NO: 11289 - protein, 181 aa, Artificial Sequence; identical to SEQ ID NO: 11288
  Synthetic

SEQ ID NO: 11290 - protein, 181 aa, Artificial Sequence
  Synthetic
DVEKDIERVVEDVKRELRRLLKEDRDVSKKVKDDLDKLLKESEEVVRRVKKELDRLREEGLDEKKIRELKKEIDELHKENEDLVRDLKRKIDRLNEENEEVVKRLEDEIKKLLDEARRDRIPKSAVDEIIRRLKELVKEMKRHVDKSIKDLEELVRRLEEHIRRSIERLKKLVEEAREDAR

SEQ ID NO: 11291 - protein, 181 aa, Artificial Sequence; identical to SEQ ID NO: 11290
  Synthetic

SEQ ID NO: 11292 - protein, 181 aa, Artificial Sequence
  Synthetic
SVEEEVDKVVKKLEEDLDRLLEESKEVVERVEKALDDLLKRDEDVSEEVRRELERLKEEGLDDKKVRDLEKEIEDLNRENKELLERLKRRIRKLHEDNERMLRELKKEVRKRLEDVRRRRIPESMVKKLLDELRKLVEDAREHVERSIRELEKLVKEADDHVRKSIEDLKRLVEEVRETAR

SEQ ID NO: 11293 - protein, 181 aa, Artificial Sequence; identical to SEQ ID NO: 11292
  Synthetic

SEQ ID NO: 11294 - protein, 181 aa, Artificial Sequence
  Synthetic
DVEKEIKDVVDKAKRELDRLLREDREVSREVKEALDKLLEDNRRSVERVERELDDLRRRGLDEDEIRKLKDRIKKLLDENKKRVEDLKREIDRLNKENEDELRRLKRELDKILREVERDKIPESVVKEILKRLEKLVEDAKRHVEDSIRKLKKLVDDMRKHSERSNRDLERLVREAREKAR

SEQ ID NO: 11295 - protein, 181 aa, Artificial Sequence; identical to SEQ ID NO: 11294
  Synthetic

SEQ ID NO: 11296 - protein, 181 aa, Artificial Sequence
  Synthetic
SVEEEIRKVVEEVKRELDRLLEKNDRSVKEAKKELDRLLEENRRAVEEVKKALDELEKNGLDKDRVRKLKEDIDARLEENERLVRKLKRDLDERLRENEKRLRELKKEVDDLLRRLATEKVPESEAKRLIDRLRELVKRVAEHSERSDRELKKLVDDLREHSKRSNDDLRRLVEEAEREVR

SEQ ID NO: 11297 - protein, 181 aa, Artificial Sequence; identical to SEQ ID NO: 11296
  Synthetic

SEQ ID NO: 11298 - protein, 181 aa, Artificial Sequence
  Synthetic
SVEDKVREAVRRAKEALKKLVEDDRRVVKEVEEMLDTLLDKNRDSVRRAKEKLEDLKRKGLDDDTVRKLLEDLKRLLDRNEEEVRRLKEEIRRENKKNEEVVERLEREVKKLLDELERDKVPESDAERLIETLERLVKELEDHVRRSIRKLRELVEEMRDHSRRSDEELKKRLKEVEDRVR

SEQ ID NO: 11299 - protein, 181 aa, Artificial Sequence; identical to SEQ ID NO: 11298
  Synthetic

SEQ ID NO: 11300 - protein, 181 aa, Artificial Sequence
  Synthetic
DVEEEIKRVVKKVEEELDKLLEDDERVVREVEEMLDRLLKKNEKVVRDAKRKLDDLRRKGLDEKRIRDLKRELDELLKENERRIRELKKRIRKLHEETRRRLEELKKEARDRLKEVEDRKIPKDVVDKIIETLRRLVKEVAKEVKRSIDELKKTVEEVRKHSEETDRRIEKLAKEAEEEVR

SEQ ID NO: 11301 - protein, 181 aa, Artificial Sequence; identical to SEQ ID NO: 11300
  Synthetic

SEQ ID NO: 11302 - protein, 181 aa, Artificial Sequence
  Synthetic
SVEEKIREVVERVRRMLEKLLEDNDRSVKEASKALDDLLRESRRVVEEVKKALDDLRRKGLDDRTVEKLKTEIRKILKDNEDLVRELKKELKRLLEENEKEVRRLEDEIRRIMEEAERRKIPESEVRRIIRELEELVKRATDHVRRSDKRLRELVDELRKHIRKSIEDLKRLVDEARRRKD

SEQ ID NO: 11303 - protein, 181 aa, Artificial Sequence; identical to SEQ ID NO: 11302
  Synthetic

SEQ ID NO: 11304 - protein, 182 aa, Artificial Sequence
  Synthetic
DEVEEIRKELEKLLEEVRRKLEKIIKDIRDLLREDKRKSERIDRELEKLLRRLEEIVRDRGPDERVLRDLEEKIKELLDDSRRHADESEKRLRKLLEDARRTLERAKKDIDKLEEEVRRRGLPEEMLREVKRVLEEVRRDIERLLEEIRKVVEEWRKRLEDLKKKNEDSAREVKRRIDELRK

SEQ ID NO: 11305 - protein, 182 aa, Artificial Sequence; identical to SEQ ID NO: 11304
  Synthetic

SEQ ID NO: 11306 - protein, 182 aa, Artificial Sequence
  Synthetic
SEVEDIIRRLRELLERHREVSKRINDELRKLLREVEEDSRRLDKEIEDLLRRIREKVTRDGPDDDTLRRVKETLEKLLRESERTIREVKRRIEELLKRSREHSKRVKEEIDKLREEVDRRGLPEDARRRVERVLREVEDTLRKLDKENEDSARRVKEALDRLLKKNEESIRRAEREIDELRR

SEQ ID NO: 11307 - protein, 182 aa, Artificial Sequence; identical to SEQ ID NO: 11306
  Synthetic

SEQ ID NO: 11308 - protein, 182 aa, Artificial Sequence
  Synthetic
DDVEELKKEIKKLLDDHKKLSKELNEDIERLLREHRKLSEEIDRRLEKLLKELEELVRREGPVEESLRKAKEDIDRLLEESKRHSEDLRRRLKELLDRSKKHSEEVKERLERLLREVERKGLPKELLDEVERVVREAKKTLDRVDEENKKSIEDAERELERMDRKNEKSVEDVRRTAKELLR

SEQ ID NO: 11309 - protein, 182 aa, Artificial Sequence; identical to SEQ ID NO: 11308
  Synthetic

SEQ ID NO: 11310 - protein, 182 aa, Artificial Sequence
  Synthetic
SEAEEIIRRLEELLKKLKKDSDRLDEEIKRLLDENRRNSKDINRRLKKLLDDLRRLVRERGPRRELIKELREKLKKLEDDSRKDIKRVEDELRRLEEESEELIRELKRRLETLKEDVERRGLPEDVLRRVEEALRRAEEDLKRLKEKNDRSLKEWRDTIRELKRENEESLRRVKEEADRLSK

SEQ ID NO: 11311 - protein, 182 aa, Artificial Sequence; identical to SEQ ID NO: 11310
  Synthetic

SEQ ID NO: 11312 - protein, 182 aa, Artificial Sequence
  Synthetic
SDVERIIEELERLLEDLERRSKRIDEELKRAADRNRRNVEEIIRRLEDLLRRLEELVRRDGPAREVIRELEEALKRLEKRVDEDVRDVERKATDLARRSDDLARKADKRIKEIEKEVDEAGLDKDVLREVRRVAEKVRRSIKELKERNEKSLRDWKREVDKLLKDIKKVLDEVRKAADDLRK

SEQ ID NO: 11313 - protein, 182 aa, Artificial Sequence; identical to SEQ ID NO: 11312
  Synthetic

SEQ ID NO: 11314 - protein, 182 aa, Artificial Sequence
  Synthetic
REVDEIRRRLEKEVERNRRNSKRIDDELKEMADRNRENVKRSIEEIKELLKRLKELVDRDGPDERVIRELEERLRRLDRRLEEDAKRAEEVIDRLRRRSEKDVRDVKEKIKDDEDRVRKRGLPEDVRREVERVLKEWEDDVRRLLRKNEDSLREWREKLKKLVREHREVTKKAEEVLRELLR

SEQ ID NO: 11315 - protein, 182 aa, Artificial Sequence; identical to SEQ ID NO: 11314
  Synthetic

SEQ ID NO: 11316 - protein, 182 aa, Artificial Sequence
  Synthetic
KDAEDIIRKLDELLDELAKAAREIIERLRDAARENEENSREINRRLEELLKRLEDAVRRDGPRDEVIKRLEEELKKIKEESERDVRRVEDAAEKLARTVEKLIEDLRRRLKKLDEDVERRGLPEDVKRKVEEVARRVRKAIDDLLRDIKRVLDDWKRKVDKLLEDNRKSLEDVKREAERLRK

SEQ ID NO: 11317 - protein, 182 aa, Artificial Sequence; identical to SEQ ID NO: 11316
  Synthetic

SEQ ID NO: 11318 - protein, 183 aa, Artificial Sequence
  Synthetic
SEVERLIKELEDVSRDIKREVTELKRDLKRLAEESKRLVEELEETIRKIVKDIEDTKRRGDDEKTLTELRRKVEEVVRRIEDRVKKSHEKVREVIERIRRRVEELEKRSREKLEEIRKEVKNGDKELVDRVEEALRDHERTLRKVVKEVDKALKDLERDNTELVKRVKKVLDELRRDVEEKAK

SEQ ID NO: 11319 - protein, 183 aa, Artificial Sequence; identical to SEQ ID NO: 11318
  Synthetic

SEQ ID NO: 11320 - protein, 186 aa, Artificial Sequence
  Synthetic
DMERKLDTVLEEVRRVVTRAKEANDRVLKDAKRVVEELSDRNRRVLEDAKRVVDELKEKRKDVDELLRRIEETVKELERTARELNKRIEDSLREIAKKHEDLKRRLEEIVKRLAEEIERLKRDLREEDEVVDKLLKKLKETLRRMEKESEELLRETEKILRELEKEVEDHLRTVEKTLEDLRREVE

SEQ ID NO: 11321 - protein, 186 aa, Artificial Sequence; identical to SEQ ID NO: 11320
  Synthetic

SEQ ID NO: 11322 - protein, 178 aa, Artificial Sequence
  Synthetic
SEVDKILEDSKRKLEEVEEMVRRLLKKSRDLLEKLERDVERLIRDSERRLEEVARAKRPDELLDKVLKEDKEKVDDLRRKLEEVYRDNEREIRRAEKELEKLLRDDERDLREAERRVKDKDLRRKLKEVHDRSRRVIEKLREELEKVHDEARKVVEKITEKIERAHDKSRRLLEEIKR

SEQ ID NO: 11323 - protein, 178 aa, Artificial Sequence; identical to SEQ ID NO: 11322
  Synthetic

SEQ ID NO: 11324 - protein, 178 aa, Artificial Sequence
  Synthetic
SEVDEFVKRSEDLLKKLEEDVRRIVRESERLLEEVERRVRKILRDLEKKLEDAERERREDRDLDRMLREVEEEIRKIEKELDDLLREDKRKLDDAVRKLEEVYRRNEEELRKIEKKVKDKELRDKLEEAHRKVKEKVERLMEDLKRAHDESEKKIRDLKRKLREVLERLRKRVEEIKK

SEQ ID NO: 11325 - protein, 178 aa, Artificial Sequence; identical to SEQ ID NO: 11324
  Synthetic

SEQ ID NO: 11326 - protein, 181 aa, Artificial Sequence
  Synthetic
DLEKRLEEAIRENRDTIRRLAKELERVIEDNKRRLEELKKEIKKVIEELERELRRVRKDGRVKERIEEKVEKMVRDVERTLAELEKRSRELVREIEEIIKRLKDSSEKLVREVEKVVEDGTTREIVDELVRRLKKHSDEARKTVEDLRRKSKKSLREAEETVKRLVEEIERLLEEIKETMR

SEQ ID NO: 11327 - protein, 181 aa, Artificial Sequence; identical to SEQ ID NO: 11326
  Synthetic

SEQ ID NO: 11328 - protein, 183 aa, Artificial Sequence
  Synthetic
SEVDELVKKIEDSERRIEEKVKRIEDELKESEERIRTKVRELHKENEKLLEEIRRKKKDSDKDKKKVIEEVRRRVEEVRKKNERVLKEMDKHSKEVVKKLREMLDRLRDHSRRLKEEIERLDNKDELRKTLKDALKRHEEVLKRVEERIRRVLKRHEEVLREAEERIRRSLEKLKRDADRVAK

SEQ ID NO: 11329 - protein, 183 aa, Artificial Sequence; identical to SEQ ID NO: 11328
  Synthetic

SEQ ID NO: 11330 - protein, 183 aa, Artificial Sequence
  Synthetic
DEVEELVKELRDSLKRIREVAKELHDRNKELLDRIKRLVDELLKEIEKVLKEIEETKKDSDKDKDKVSKEVRERVKEIVKRVRDALRELEKRVRDVIEENKDMLKKLEDHSRRLKEKVDRTDDKEEVRRKLEEAVREHERELERMAREIRKSLEDLKRVLEEVAERIKEVLRRLEKRVKEVED

SEQ ID NO: 11331 - protein, 183 aa, Artificial Sequence; identical to SEQ ID NO: 11330
  Synthetic

SEQ ID NO: 11332 - protein, 183 aa, Artificial Sequence
  Synthetic
DEVEELVERLRRSLEKIRDRVRRLLERIKRLAEKIKRDIERLHKKNEDLAREMRKSERKSDKDRKEVLDRLRRRVEEVKKENKEVLEKAERDVKRIADEIKKVLDDLRKHSRDLEEEVRRLDGKEELRKKLRKVVEDHKRVLEEVKDRLTKVLRELEEVLEKVKRDIKKSLEDLEKVLRELEK

SEQ ID NO: 11333 - protein, 183 aa, Artificial Sequence; identical to SEQ ID NO: 11332
  Synthetic

SEQ ID NO: 11334 - protein, 183 aa, Artificial Sequence
  Synthetic
SDVERLLTKLKEVAKDLARIVKRLDEENEKLSEKAEREIRKLDRDNERLLEELEERKRRSDKDKEEVTRRAREEVKRVEEENKEMTDRLRRESDELRKKNEEALKRMEERVRRLEEEVERRNGEDRLRKKLKEVLDDLRRVLEELKDHIRRSLDKNRRSLEELEEHIRRSLTELRRRLEELAK

SEQ ID NO: 11335 - protein, 183 aa, Artificial Sequence; identical to SEQ ID NO: 11334
  Synthetic

SEQ ID NO: 11336 - protein, 183 aa, Artificial Sequence
  Synthetic
DEVRELLERIEDEIRRIREEIKKLDEDNKKLAEDIRRKIEELDKENKELLKRIEDKKRESDKDKEEVTRRVRKEVEEVEKKNKDVLRDLKRKVEDAERRNEEVLRRLEERVRELEERIARLDGDDEVRDRLRTILKKLREMLKEVKDRIDDSLRRLREVLDEVAKHIERSLKELKDRVREVEK

SEQ ID NO: 11337 - protein, 183 aa, Artificial Sequence; identical to SEQ ID NO: 11336
  Synthetic

SEQ ID NO: 11338 - protein, 178 aa, Artificial Sequence
  Synthetic
SDKEEIKKVVDDVRRDIRRLEKELRDLNERFRKRVEELKKRLEEVNDRARREVERLKSRITDERLRRRLDEVLKRDEDKSDKLRKELDELLEEVNRRTRTLEKRLRDLLDEIEKVSRRDLEDVDTLKRRLEDVLRKAREEVEKWKEDLERLLREAERRVREYEEDTRRLLKELEDETR

SEQ ID NO: 11339 - protein, 178 aa, Artificial Sequence; identical to SEQ ID NO: 11338
  Synthetic

SEQ ID NO: 11340 - protein, 182 aa, Artificial Sequence
  Synthetic
NVEDEVRRVVTELEKTLREVLKRSKEALDRLRETLERLLKELEDVHREANEDLTRLEREDERLLRRLKELKEESKKILDDLEEILRRILERVKEIHRRNREFLERIREEVRELLRELRRNNVPESVVKRLVRELERLLREVEKHLEDSKRELEDLLRRLRERLEELKKRHEDLLREAREETR

SEQ ID NO: 11341 - protein, 182 aa, Artificial Sequence; identical to SEQ ID NO: 11340
  Synthetic

SEQ ID NO: 11342 - protein, 182 aa, Artificial Sequence
  Synthetic
SLEETIEEVVRRNKETLDRARKKSEDVLRELERVLRELKRRTDEVARKLKEELDKLDREDEDLKRKIKRIEERLRELLETNRRMLERILEEAEKIHRRNERRLRELKKRTEKLLRDLKRDQVPEDVVRRLLEELERLSRDLERHVKRSEEEARDLLRKAREHVERSVKEIEDLLEDLKREAT

SEQ ID NO: 11343 - protein, 182 aa, Artificial Sequence; identical to SEQ ID NO: 11342
  Synthetic

SEQ ID NO: 11344 - protein, 182 aa, Artificial Sequence
  Synthetic
SLEETVRKAVRRNRETLRRLKRESEEAVKEAKEVLDRLREETERVLRKLEKRLRELRREDEELERLIEEIRRRLEELLKENEDLLKKIDDEVKKLLRENEDALRKLLEETERLVREAETKKLPKSMVDELLRTLEKLSDEIRRHVEKSKEDLERLLRELKKHVKRSVEEIEKLLEKLDKEAN

SEQ ID NO: 11345 - protein, 182 aa, Artificial Sequence; identical to SEQ ID NO: 11344
  Synthetic

SEQ ID NO: 11346 - protein, 180 aa, Artificial Sequence
  Synthetic
SEVDEILKRIKEVLKRNKENVERIKKRIKEELDRNRKNVERILRTIEKLLKELEDIARREGPRREVAERLRRELEKLLRDVEEDLRRVDERAEELKREVDEDLRRSEEEIRKLEEDVRGNDEELRKKVKEVMDRWRETLDRLREEVERVLEDWRRKLEELRRRVEKVLRDAERVIKKVEE

SEQ ID NO: 11347 - protein, 180 aa, Artificial Sequence; identical to SEQ ID NO: 11346
  Synthetic

SEQ ID NO: 11348 - protein, 174 aa, Artificial Sequence
  Synthetic
SEREEIERVLDENRRSLEELEREVEDALRTWEEELKKVEEAVRKVLEDVRRELEKDLKDAKELVKRVEKILRELEEEVREDKRRSKEAADKLRREVEKASEDNKRELDRLREALDRAEVEKIKTEVDDLSRKLRETVERLKTELKKVIDRNRKTLEDLERRARKLIKEARDAAK

SEQ ID NO: 11349 - protein, 174 aa, Artificial Sequence; identical to SEQ ID NO: 11348
  Synthetic

SEQ ID NO: 11350 - protein, 174 aa, Artificial Sequence
  Synthetic
REREKIEDLLRRNEKSLRDVARAVERILEEWRKVVEDLTERNKELLKEVEKVVRELLKDDKDLLRRIKEMLDRSREKTKRDKERSKEVADKLRDELRRLVKENRDRLRDLRRLLERLDVDEIAKELKRLSDKLREMLKRLTDKAKRLIERNEKTSRDNERELRKLIKEAEDAAT

SEQ ID NO: 11351 - protein, 174 aa, Artificial Sequence; identical to SEQ ID NO: 11350
  Synthetic

SEQ ID NO: 11352 - protein, 176 aa, Artificial Sequence
  Synthetic
SKEERLERLIEENKKSLDELSKRVEEVIKENKDVLKRLKEKIERLIEKNRRELERLKKDVDEDKARRLEESSERLETRARKIVEDMKKTSDELSEELKRVVEEMERSSRDLEREAKEREAREELERELRDHSRRLKEIVERIERKVREHIRELEKIVKEVEREVEEHIEKLERTVR

SEQ ID NO: 11353 - protein, 176 aa, Artificial Sequence; identical to SEQ ID NO: 11352
  Synthetic

SEQ ID NO: 11354 - protein, 176 aa, Artificial Sequence
  Synthetic
SDEDRLRELLKKNRESLKRLSDEIRRLIEENRDALRRVKETIKELLRKLKEVVERVRKDVDDDKVREIKKEVDKIEDKVRKILEEMERTSRELEKRLRKLLKEMDESSRRLADELRKRKADEEVRKTLEEHSRDLRRKVEELAREVKRHIRELEKILKEVKDEIEEVIRRIEETAR

SEQ ID NO: 11355 - protein, 176 aa, Artificial Sequence; identical to SEQ ID NO: 11354
  Synthetic

SEQ ID NO: 11356 - protein, 185 aa, Artificial Sequence
  Synthetic
SEIEDAAEKVRRNSEEAKRILDEHRERVKRVLEEIERLVKRAEERIEELIRTIERLRKDGRPTEDLAREIKRIVDEVRKALEEIKKRIEDLLREAEEHSKKVKKDLDRSNEELARTAEELKKRITDEEVRKKLEDILRKNEETSREIKKRLDRIDDDLRRVLEKAAKRLRDLLEKLREAVRRVET

SEQ ID NO: 11357 - protein, 185 aa, Artificial Sequence; identical to SEQ ID NO: 11356
  Synthetic

SEQ ID NO: 11358 - protein, 185 aa, Artificial Sequence
  Synthetic
SEIEKVKKEVEENSREAKRIVDEHKRLVEENSKEMEKLLKEAEDTIRKLLKEIKELKDRGLPKEELAREIRDILRRVEEKLRDIERRLDESNERLRRHSEKVKRDLDRSNEELEKRVRELEKRITDERMREKLRRALEENRRTSERLKRKLDDIDRDNERTSREVKEKLKRILEELKRTLEEVER

SEQ ID NO: 11359 - protein, 185 aa, Artificial Sequence; identical to SEQ ID NO: 11358
  Synthetic

SEQ ID NO: 11360 - protein, 185 aa, Artificial Sequence
  Synthetic
SEIDKARDEVRKNSDEMRKIIERHREKVEDNSRRMKETVRRVEEEIERIIREIEELKKRGLPKEELRRRIEELVKEVEDRSEEHKRDLDRSNEELRRHSEEVKRRLDESNKRLDDKLRELERRITDRRLREELRRIAEENKKTSDDLKKRLDRIDKENERTSEELKEENDRLLEKLRRAADRVKR

SEQ ID NO: 11361 - protein, 185 aa, Artificial Sequence; identical to SEQ ID NO: 11360
  Synthetic

SEQ ID NO: 11362 - protein, 185 aa, Artificial Sequence
  Synthetic
REIEEFEKDVRRNSEDMERIAREHEKLVRDLLRELKRLVDDLKRRLEELAEEIKSLREQGLPREELTKRIKEIVDKVRRELEELKKRIDDLLREARKHSEDVKRRLDKSNEDLERKLRELEKRITDERLRERLKRILDKNKETSDRIKKRLEDLNRELERVARELKKTIDELLRELEEVVERVRK

SEQ ID NO: 11363 - protein, 185 aa, Artificial Sequence; identical to SEQ ID NO: 11362
  Synthetic

SEQ ID NO: 11364 - protein, 185 aa, Artificial Sequence
  Synthetic
SLEEEVKKLLEELKKVADKLTKEVREADKKLEEVLRRVKRRLDEVDRRLEEEIKKVKSRITDERLRRRLDELLERVREHSKRLKERLDKILEDVNRRTKEMEERLRRIVKEVEELVEEVKRRKSDREELLERLKRRIDRLIEEARRLVEKWRDELKKLIDEVRKLVEDHERKVRDIEKKVRDESR

SEQ ID NO: 11365 - protein, 185 aa, Artificial Sequence; identical to SEQ ID NO: 11364
  Synthetic

SEQ ID NO: 11366 - protein, 181 aa, Artificial Sequence
  Synthetic
DAEEKARRVLEELDEALKRLAKKIKESIDKLKDVLRKLAEIIKRSLDELDEVLKRLASKLDKKDLDRIREELEKLKEDNKRDLDKIARELEELVRRNEDKLREIARDLERLKEELKRVLDRDGGVGEEILEELRRALEELKREVDELDRRNEEALERLKERVKRLNEDNRRTLERLEREVD

SEQ ID NO: 11367 - protein, 181 aa, Artificial Sequence; identical to SEQ ID NO: 11366
  Synthetic

SEQ ID NO: 11368 - protein, 184 aa, Artificial Sequence
  Synthetic
DVEELLRRLLEELRRVVKEVEDINRRSLEEARRVLKRLEDDHRRVLKELEDVLERLRRQGLPEDVVRTLTREIREMAEKHKKLLERIREAVKRSEEEHKRHTDDVRRTLETIERELEKVERRGVSRETIEELLRKVDRDLKRIRTTSEDLVRKNEELLEKLERESRRVVEESRKRLKEAEERTR

SEQ ID NO: 11369 - protein, 184 aa, Artificial Sequence; identical to SEQ ID NO: 11368
  Synthetic

SEQ ID NO: 11370 - protein, 184 aa, Artificial Sequence
  Synthetic
SVEEKLKDLEKENKDSLDEIRKLNEDSLEEAKRVLKKLEDTHRTVLRKLEKVLDELRKRGVPREDVERLKKIMEDAARKHKELLDDLRRKVKESEDRHRDHTRRVEEKSKELRRELEDVRRRGEDDDAIRKLRKKVEDTSRDLKRTSDDLVRRNRKLLKELEEESRKVVKESDEILRKMKEEVR

SEQ ID NO: 11371 - protein, 184 aa, Artificial Sequence; identical to SEQ ID NO: 11370
  Synthetic

SEQ ID NO: 11372 - protein, 184 aa, Artificial Sequence
  Synthetic
SVEEKLDELEKRIKEVLERIERINEESLRRAEEVLRDLEETNRRALERVRDVLRRLEERGVPEKDVDKLRRIVEKLERDHRDLIRRLRELVKRSKERHEEHTERVRRTIKRIREELEDIKRKGVDDDAIRKLLETVDRRLKELTETSKRLVEENRDLLRRAKEESKRLVDESEKVLEEMDRETR

SEQ ID NO: 11373 - protein, 184 aa, Artificial Sequence; identical to SEQ ID NO: 11372
  Synthetic

SEQ ID NO: 11374 - protein, 184 aa, Artificial Sequence
  Synthetic
SADETLEELEKELRRVVDEVRRTNEEANKRLREVLRKLEKKNDDVLRDLERVLKELEDRGVPEEVVRRLRKIVEDLKREHEKLIKKLREEIKRIIDDSRRHIRDVERILEKIRKELKDIRDKGVSEETIKKLREDVKRELDRIKTSSKKLVDDIERRLRRMEEESRKLAEDSRRILEEMRKEVT

SEQ ID NO: 11375 - protein, 184 aa, Artificial Sequence; identical to SEQ ID NO: 11374
  Synthetic

SEQ ID NO: 11376 - protein, 175 aa, Artificial Sequence
  Synthetic
SEVEKLVDEIKKELKRLRETSKKLLDEIRELLERLKRSSKKLVDDIKRILEELKRRNLPREDVERLLREIRKRVEEHKKRLREALERVERRVRDHNRELRRVLEEVERKVREIEKRGVDKDKLEKALRDARKVVEDIERTNREILKRVRDMVERIREDNDTVLEEVERMAEEVRK

SEQ ID NO: 11377 - protein, 175 aa, Artificial Sequence; identical to SEQ ID NO: 11376
  Synthetic

SEQ ID NO: 11378 - protein, 185 aa, Artificial Sequence
  Synthetic
REIEELKKKVEKVLRELRKSSEEMKRRVEDLIRRLKKSSKDLERKVKDLLKKAEEKVRRDGTTDELKRRLEKEARDLERELRKHDEDVERKVRKLKEELKRHNEEVEDIIRRVEEELKRVADKIDDEEARRRLEEVVRRLRKVLDDVRKINKEVVDRLKKALDEVKRTNEDVVRDLRKVLEELKT

SEQ ID NO: 11379 - protein, 185 aa, Artificial Sequence; identical to SEQ ID NO: 11378
  Synthetic

SEQ ID NO: 11380 - protein, 177 aa, Artificial Sequence
  Synthetic
SEIEKLKEEIRRLLEEIKRHAEENKRRVETALRDIERHVEENTRRVAKVEEEIKKLKDRVRREELDEILKRVKDHLEEAKRRIKEILRRVEEHVKRSKRRIDELLRRLKEKVARIKEAGVDKDELDKVEEEAKRVAEEVKEIHDRVLEEVRRVVDRVLKAHDEVLRRLERVVREVKR

SEQ ID NO: 11381 - protein, 177 aa, Artificial Sequence; identical to SEQ ID NO: 11380
  Synthetic

SEQ ID NO: 11382 - protein, 177 aa, Artificial Sequence
  Synthetic
EEEKRLRELEKRNEDVIRKAAEDVREILRKNEEVLKEAEDRIKRLIDEDRRVLEEVKRDDSRDDKLRKVTEESKKLVRETERVLEELKDSSRKLKEELKKLLDELRDSSEKLKDDLRKRRVDEELEREVRKHDKEVKEVIDRLREKSERHIREIERIVDELRKKHEATVRKLKKDVK

SEQ ID NO: 11383 - protein, 177 aa, Artificial Sequence; identical to SEQ ID NO: 11382
  Synthetic

SEQ ID NO: 11384 - protein, 177 aa, Artificial Sequence
  Synthetic
DEDETLRELEKKNDKALDDARRTIEEVIRRNEEVLKRAAEEIEKLERKNKRVLEEVKRRDSRDDVLRKIEDSSRKLKEDLRRVLEDLKRTSEELKRKLREVLKRLEDSSRRLKDELRKRRVTEELAEEVKRHDDRVRKEIEKLKREVEKHDREVKETIDRLAKKVDDHLKELRDTTR

SEQ ID NO: 11385 - protein, 177 aa, Artificial Sequence; identical to SEQ ID NO: 11384
  Synthetic

SEQ ID NO: 11386 - protein, 189 aa, Artificial Sequence
  Synthetic
DEIKEIEETVERLVEELKRIVEEWREESKRNVDELEKRIRDIKRRIDEAIKTLEELKRRGLPKEELSERIKRILEKLKREIDKVKEEVRRSHKDLDRKSKEIETRIRKLLEDLERKIREAKKRMKDDSRVEELRRALDELLEKARKVVEEVEKMIKEVNDRNKKVVDELKRTLDKILKDLEEVAREVDR

SEQ ID NO: 11387 - protein, 189 aa, Artificial Sequence; identical to SEQ ID NO: 11386
  Synthetic

SEQ ID NO: 11388 - protein, 189 aa, Artificial Sequence
  Synthetic
SEIEKMKRDSDENIKRMEEIARKWEKESRDNIREIEKRVEDLKRRIEKVIREIEKLRRDGRPDEDLKRKLDDDLRKLKEEVEKLKEDLRRSHEDLDRRSKEIKREIRESHRKVEEDIRRIEEELRDDKDLEEAKRKLEEVLDKNRRVVEKVERRIDRINDRNREVLERAEKELDDILRKLEEVVRRAEK

SEQ ID NO: 11389 - protein, 189 aa, Artificial Sequence; identical to SEQ ID NO: 11388
  Synthetic

SEQ ID NO: 11390 - protein, 182 aa, Artificial Sequence
  Synthetic
DEIREAKKRLDDIVTELRDHIRRSKERHERLVKELERHIRELEKKVRELIKRLDDAVRRDGKVDEELLRRLRETAKRDAENVEDVNRRLEEELKKNKEDVDRMNDTLRKRLEEIAKEVSRMDKEEVKREITRLLEDLKRVSREHREEIRKLLETTREVSKRHREKVEDLLRKLEEVLERVRT

SEQ ID NO: 11391 - protein, 182 aa, Artificial Sequence; identical to SEQ ID NO: 11390
  Synthetic

SEQ ID NO: 11392 - protein, 182 aa, Artificial Sequence
  Synthetic
SELEEIARLAEEIERKLRESLRESDKMHKKLNKENEDLLEKIRKEVEDIIKKLRDLKGTSEKILKDLAKEVEDVIRKIEELVKDAERRNREALERDRRKNEELRREVRKVIEDIKERVRRVRDERVEEAVRRVVEKIKDVVEKHSDASRRLNEELKESVDRLRREVEKLVEKIRKVVEDLRK

SEQ ID NO: 11393 - protein, 182 aa, Artificial Sequence; identical to SEQ ID NO: 11392
  Synthetic

SEQ ID NO: 11394 - protein, 185 aa, Artificial Sequence
  Synthetic
SDLERVEKESRDHIDTLRRIVERVEEHVRRSIKTLDELVDRARRSVERLIEELEEMKRKDKDKEKMTRKIEKLLKDAEDEIRKLKKEIRELHKRNEDEVRRVKEEIRKSLKEVEDRIKEIRDKTTDRRVEEELRRLLEENRRVVEEVEKELDRLLKESEDAVRRVEEALDRLLKELERVAKEVKD

SEQ ID NO: 11395 - protein, 185 aa, Artificial Sequence; identical to SEQ ID NO: 11394
  Synthetic

SEQ ID NO: 11396 - protein, 185 aa, Artificial Sequence
  Synthetic
SDLEKVKKDSDDHIRELERLVRRAEEHVRDSVRRLREIVEELDRDVRRLIEELKDLKRKIRDKEKLIRTIRRLLEELERKVREIKKRIREENEKNEREIRKLKEEIRRSLEEVERRLREIKKKTTDEDVKKKLDDLLRENREAVKRVERALDKLLTDDRRVVEEVERALDELLKRIEKVAREVEK

SEQ ID NO: 11397 - protein, 185 aa, Artificial Sequence; identical to SEQ ID NO: 11396
  Synthetic

SEQ ID NO: 11398 - protein, 185 aa, Artificial Sequence
  Synthetic
RDVDELRKESEDHIRELRKLVEDVRRHVKRTNDDLERLVKEVDDTLKELIKEVKELKRRVTDKEELVRRLEKLLRDLEKKARELKEEVKRLLERNRETLEKLERELKKSLDELEKRADDIRRKTTDEDVKKKIKDLLDTNREVVERVLRTLRDLLRRNKEVIDRILETLDELLERVKREIEKDAK

SEQ ID NO: 11399 - protein, 185 aa, Artificial Sequence; identical to SEQ ID NO: 11398
  Synthetic

SEQ ID NO: 11400 - protein, 185 aa, Artificial Sequence
  Synthetic
DDAERAKEESERHIKRLKDLVEELRKHSERTDEEIKELLRRLEKTVRDLIRELERLKEEIKDKDTVTRRIDKLLRDLEEKVRDLKRRLKKLLEDNKARVDELREDIKRSLEELERRVREIKEKTTDEDVKRKLDKLLKENEDVVREVDRALKELLRKNAEMLERAKERLDRLLEEVKKVADEVRR

SEQ ID NO: 11401 - protein, 185 aa, Artificial Sequence; identical to SEQ ID NO: 11400
  Synthetic

SEQ ID NO: 11402 - protein, 182 aa, Artificial Sequence
  Synthetic
SIEEELERLLRKNEDSLRRVRDEIRRLEEEIRRVLKKWRDEARKLLREIERVLKEVAERKGKREELDEILERVERDIEKSERDLRRLEEEVKKLVTDIEKAIKDIEDESRKAIEEVRRKRSTDETLLRDLERKSKEVDERLEELLRRAKERVEELIREIEALLDRNRRNVERLIRELERRTD

SEQ ID NO: 11403 - protein, 182 aa, Artificial Sequence; identical to SEQ ID NO: 11402
  Synthetic

SEQ ID NO: 11404 - protein, 179 aa, Artificial Sequence
  Synthetic
EELERLLEDVKRTLKELRDRAKEVLDRVRKTLEELKRELKRVLDEVTELLERLRRIVKREGKVEETLKRVEEELRRLAEEVKRLNEEHRRKLERLAREVRKLNEEHRRRLEELTKRAEDKGLDKRIIKEARERVETVNRETKKILEEIARTVEKVDEESRRILEKVKRDAERVLREIKK

SEQ ID NO: 11405 - protein, 179 aa, Artificial Sequence; identical to SEQ ID NO: 11404
  Synthetic

SEQ ID NO: 11406 - protein, 180 aa, Artificial Sequence
  Synthetic
DELEEVEKEVKRILEESRRLLEELEREVRELLERSKRILEELEEEVRRLLEKLKRVRTRGEKDLEELIKTEVRRLEKKIKDLLDKDREMLKRATERLEKVYRENRELIERVKRKLDDLARRKRKDEELERLKRELDKVHEEVREKVERAKRELERVHKRSEEEARRLKEEVDKVLDELRK

SEQ ID NO: 11407 - protein, 180 aa, Artificial Sequence; identical to SEQ ID NO: 11406
  Synthetic

SEQ ID NO: 11408 - protein, 186 aa, Artificial Sequence
  Synthetic
SELDELRKRVEEIVEENDRVLRELEKRVRELSERNKKTLKELTKRVREILERLKELKDRGEDKDTLDKAIRRVEEEVKELVERVTRHDEESKKEVRKLVDEARKHLEESKKRVDDLKRKVEKRLGQLEEVKEVVRRLEEKVKESLDRAEKVLRRLEREARESNRRHEEEVRRLKEEIDRVVTELRR

SEQ ID NO: 11409 - protein, 186 aa, Artificial Sequence; identical to SEQ ID NO: 11408
  Synthetic

SEQ ID NO: 11410 - protein, 186 aa, Artificial Sequence
  Synthetic
SLEDVLREVEERIRKSLEEHRKVTDEAEKELRRIVEDHKRVLEEVKKEIEDVIKELKKESVDEEEVRKLVRELREALKRLEKHSKDLEEEVKRVVEEMRKRSKELKERNDKVLDELRKKVKDSDDEKEKVAREIRETVKKLHEDNRRMSEEIKKTVERLLDKLRRSLERIRREAKDLVRKIEDLRR

SEQ ID NO: 11411 - protein, 186 aa, Artificial Sequence; identical to SEQ ID NO: 11410
  Synthetic

SEQ ID NO: 11412 - protein, 186 aa, Artificial Sequence
  Synthetic
KLEEVLRKVAEDIKRSLEDLKRVLKEVADHIRRSLEELRRVLERVKKEIEDVLRELENSELDKRAVDKIVKEVKEALDELEEAVRRVAKENEDALRKLAKDVEDVARRNKEAVDRARERVDKSDDDADKVAEDIRRDVRRLDEENRELAERIKRAIEELDRKNKDLARRIEDAVRRLLEKIKEAVR

SEQ ID NO: 11413 - protein, 186 aa, Artificial Sequence; identical to SEQ ID NO: 11412
  Synthetic

SEQ ID NO: 11414 - protein, 186 aa, Artificial Sequence
  Synthetic
DLEEVLKEVEKRIRDSLKDLKRVLDEVLDHIRRSLKENRDSLRKLEEDLRRVLEELRRTDLDERVVKKIEDEIDKVVKRMEKVSRDLEEDNRRVLEELEEEVRRVMKENKDVLDRLRDEVTRSDDDEKKVAEKIRKEVKELDEKNKELARRIRDVAKKLDERNKDVSRRLAEEVERLLRKIKEKVR

SEQ ID NO: 11415 - protein, 186 aa, Artificial Sequence; identical to SEQ ID NO: 11414
  Synthetic

SEQ ID NO: 11416 - protein, 186 aa, Artificial Sequence
  Synthetic
DLERVLEKVARDIEESLRRNKESLKRLKEHVEESLKENRKSLEDLRKKLKDVLDELKKTELDESEVKEIEERVKKVEEDLERKSKKLEDENRKAVDELRKLSEDLERKNRKVLKELKDEVKDSDDEKKKVADKIREEAKRLDKENREASDRARDVVRRLDEKNKKLSEEMKRTVERLLETLDRKMR

SEQ ID NO: 11417 - protein, 186 aa, Artificial Sequence; identical to SEQ ID NO: 11416
  Synthetic

SEQ ID NO: 11418 - protein, 186 aa, Artificial Sequence
  Synthetic
DLERFLEEVARKIEKSLEELRRVLEEVRDRIRRSLEENTKSLERLTEEVRRVLERLKDTDLDKKEVEDIEREVRRVERTMRELSKKARRDNTEMLRDLARKVDEVEKENKRVLERLREKVKDSDDDEDKVAKEIEDEVRRLDEKNRKLAKEIRDEIRKLDKENKDLSKELRDRVEELLRKIEETVR

SEQ ID NO: 11419 - protein, 186 aa, Artificial Sequence; identical to SEQ ID NO: 11418
  Synthetic

SEQ ID NO: 11420 - protein, 178 aa, Artificial Sequence
  Synthetic
KAAEEIRKKVEDYKRESEKILEEVEDHSRRSKETLKRLLDDLRRAVEELKRRLEELKRRPRTEEIAKRAEEAVRRAAERIKKVIDDVERHIRENAKELKRLLEEDREASRRLEDEIDKEVKAREVADELKKRLKRANEESERVLRELAERNKTALEEAERVLRRLKEEIEKVLRKLKK

SEQ ID NO: 11421 - protein, 178 aa, Artificial Sequence; identical to SEQ ID NO: 11420
  Synthetic

SEQ ID NO: 11422 - protein, 182 aa, Artificial Sequence
  Synthetic
SEVEDLRRRVEEIKRRVEEILRENKEVSEKSIRELERLLEELKRLVDELLKRLEELKREGRDKKEELKKLLEDAERLLRKVEEEIERLKRESEDHLRRSNEEVDELVKRMEELLKEIEKRSRDDDLRRALKDVVDEVKKVVDELREENDRLRKENKRAVDEVRKELERLLRDVERVIRRAEK

SEQ ID NO: 11423 - protein, 182 aa, Artificial Sequence; identical to SEQ ID NO: 11422
  Synthetic

SEQ ID NO: 11424 - protein, 182 aa, Artificial Sequence
  Synthetic
EELDRLRRHADESRKRAEEILKRNEEEIRRLVEELKRILKTNEDVLRDLEKKLEDLKRRGERREEDLRKLLEDAKKHLTDSNKRLEELKERIERHLRRSNKELEDILETNRETLKELEKRSRDDKLRTTIDEVRRRSKKVLDDLRDRNRRLLEEVDRAIKEVRETNEELLRRLKRVIDEVRR

SEQ ID NO: 11425 - protein, 182 aa, Artificial Sequence; identical to SEQ ID NO: 11424
  Synthetic

SEQ ID NO: 11426 - protein, 185 aa, Artificial Sequence
  Synthetic
SAEELLRTIEKRIEDNHRRLEEILEEIARLIEDMLRTDERIVREIKELLKEVLDRVRRAGVPEEVLERVRRELERLKKELEELRRRSEEKVKELKRRLEEIRRKLEEEHRDLRRKLEELRRDLGDKEEVVKKLVEDVERELERSLREAEDLLRRVEEVIRTSKKESKDVLEKIERLLRDLERRTR

SEQ ID NO: 11427 - protein, 185 aa, Artificial Sequence; identical to SEQ ID NO: 11426
  Synthetic

SEQ ID NO: 11428 - protein, 180 aa, Artificial Sequence
  Synthetic
SVAEELKKEVDDLLRDLKKKLDDVRRDHERLLRELEEHLERSRERVERLLRTLEDVARKGRVEEELLKELKKRIDEIAKENRDLLKELEERSRDTLRKLRETLKKLKKRVDDLIRKVEEEKKIDRKVIEKIERDIRKILKEVEEVLRTLKKKSDEILERAKRVTEKIERDVTEILERIKK

SEQ ID NO: 11429 - protein, 180 aa, Artificial Sequence; identical to SEQ ID NO: 11428
  Synthetic

SEQ ID NO: 11430 - protein, 180 aa, Artificial Sequence
  Synthetic
SVADELRKTAEELLKRLREHLDTSRRRVEDLLRRNEKKLRDVLREVKKLLDELRELKERGRVDDEVLKELKKRVDDLIRELEETNRKTREDIRRILEENRKLLEDLRDEIRKLEEKVRRDNKAPEDVIREIKDRVRRILDEARRVSEKLRRDVEKINRESREVLERIKELIKRILKEAKD

SEQ ID NO: 11431 - protein, 180 aa, Artificial Sequence; identical to SEQ ID NO: 11430
  Synthetic

SEQ ID NO: 11432 - protein, 178 aa, Artificial Sequence
  Synthetic
SELEELLREVDDSLKKLETEAKKLLDEVRDSLRKLEETLRRVLREVEEELKELEKENSKDDRTLERVKEMLDRVAKRIKDMNREHRKKVKELEDRVRELNKRHRDKLEELAREVSKNSDKRVEDVLREIRRRAREINERLKKILKEAKEVAEKVNEETRRVLKEIKELIERVLRELRK

SEQ ID NO: 11433 - protein, 178 aa, Artificial Sequence; identical to SEQ ID NO: 11432
  Synthetic

SEQ ID NO: 11434 - protein, 176 aa, Artificial Sequence
  Synthetic
REAEEAKEEVEELNRRNKKELDDARRRVDELDKRNKDRLKESSDRVKRLVEELERVKEEGRSDDRLREKIERMLKTSADELERLKEENKRALRDLAERLRELIERNRRKLEEITRRTVPDKDVLKRLAELIKESIRELERVLEELAEKIDRSLKELDDVLRKNETDLKRVIEDLKR

SEQ ID NO: 11435 - protein, 176 aa, Artificial Sequence; identical to SEQ ID NO: 11434
  Synthetic

SEQ ID NO: 11436 - protein, 179 aa, Artificial Sequence
  Synthetic
DEAEKAKRDSEKVVEDNRKMLEDSTRRAERLNEENKKELKKSTEEAEKILREIDETKRRGTDDEVVKDLIRRVEELLERSRKKLEDLTRDNERVLDESRRRLEKLIRDNERIVKDLTDRVVRVDEVLKRLKEEHRRLIEELEEVLRRNEEIIRRSIEDLERVLDRNRRELEDVIRRLKE

SEQ ID NO: 11437 - protein, 179 aa, Artificial Sequence; identical to SEQ ID NO: 11436
  Synthetic

SEQ ID NO: 11438 - protein, 179 aa, Artificial Sequence
  Synthetic
REAEEVERKVEELNRRNRKVLDDARKESEEVVRRNREFLRRLEERVRTILRELDKRKRDGTSEEVIKRLIDRVRKILEDIRRLVDELIKRNERIVEKLTRIVEELIRRNKKLLEDIRRELVKVDEVLRRLAEDIERSIRELEKVLRELERIHRELIKELKEVLKRLEKDAKEVIERLRT

SEQ ID NO: 11439 - protein, 179 aa, Artificial Sequence; identical to SEQ ID NO: 11438
  Synthetic

SEQ ID NO: 11440 - protein, 186 aa, Artificial Sequence
  Synthetic
SLAEEIDKTIRELAKRHEKTVEDIKKIITELEKKHRDTAEELERIVREIEKKIRELKKRLKDDKDKLRELKDELRRILEDAARKSKRVVEETEEVNREINKRSEEVVRDTERVLRKIADDLRRRIRREELERVLREAEETLRRLIEKDEKVNREADEKSERLIREDEKVLEDVAREVERLLRELDK

SEQ ID NO: 11441 - protein, 186 aa, Artificial Sequence; identical to SEQ ID NO: 11440
  Synthetic

SEQ ID NO: 11442 - protein, 186 aa, Artificial Sequence
  Synthetic
DEDREARELVERLREEHRRTAEEIKKIIEDLERKHRETMERLKRIIEKIERDIRRLKRDLKDDKEMVERLKKKIKDILKKLAEESKKVVEETEKVNEDINRKSKEVIDRSRKLLEDLRRKLEERSRDKELERVLEKVARDLKKLVDDDRRVNETANRRSRKLIEDDKRVLEEAAKEVKRLLDELDK

SEQ ID NO: 11443 - protein, 186 aa, Artificial Sequence; identical to SEQ ID NO: 11442
  Synthetic

SEQ ID NO: 11444 - protein, 171 aa, Artificial Sequence
  Synthetic
DTERTVKEKIRKWKEDVERVERRLEELVDRARKLSKENVDRMRELVRRLEDRVRKDPDKDKLRKEVERLERRIEESHREVKELVERIKKEIKELVDELHRRSEDIKRDLEEKVRVREVLEDARRKIDELNERVERVAETVRRKLDKILEDNKRVVERVKEEIRRVLEELER

SEQ ID NO: 11445 - protein, 171 aa, Artificial Sequence; identical to SEQ ID NO: 11444
  Synthetic

SEQ ID NO: 11446 - protein, 174 aa, Artificial Sequence
  Synthetic
SEEEVLREAAKTVEKLLDEIRRSLEKVSKRVEDSNRELKESLDRVRERVRELLEELRKNNVDRTLLEDVRRKLERIEERNEEMNDRSRRKLEELRERNRKILEDIRRTLEDLKRRQLPKDDVERTLREIAKLVDEVDKENKRALRENEERVKTLNRENEEMLKRIEEEVRRATK

SEQ ID NO: 11447 - protein, 174 aa, Artificial Sequence; identical to SEQ ID NO: 11446
  Synthetic

SEQ ID NO: 11448 - protein, 185 aa, Artificial Sequence
  Synthetic
DLEEVAKEVKKALDELLKRNEDSARRVKEAIRELLKRINDVTREVEETLDRLLKEVEDGGVPEEDLKRAEDEVRRLKEDLKRRDERLERAARTLEREIDKLLDENRRKVERLKEEIDDLARKGQPAERVVKRLEELLREAAEHSKRSNDELERLLDRLRREVERYERELEKRKKEAKELADKLRK

SEQ ID NO: 11449 - protein, 185 aa, Artificial Sequence; identical to SEQ ID NO: 11448
  Synthetic

SEQ ID NO: 11450 - protein, 182 aa, Artificial Sequence
  Synthetic
DLERRLDELLKRIEDRVRELVRTLEESLRELERRVREIIRRLEEHLRRIEKMVRDLKRANKPDKAVKDDVRRLRENADRLNKRVREELKKLREDVKRVNEDVKRELDKLAEEAKDMLRKLREAGIDERVIKKAEEDVRRLLREIEEVSERHKREVDRLEREIEEVSREHKERVEKLLREIER

SEQ ID NO: 11451 - protein, 182 aa, Artificial Sequence; identical to SEQ ID NO: 11450
  Synthetic

SEQ ID NO: 11452 - protein, 182 aa, Artificial Sequence
  Synthetic
KLEEDLKRILDELRRMAKEIIDRLEDHLRKIKKDVDKLSKENKDHLKEIEDTVRELKRNNLRREDVKRKAKELEKNVKRANEETERKLRELEKNVKEMNTDVKRRIDELVKRAKDILDRLREEGIDERVIKRVDEEVKKLAEEIRKVSEEHEKRVKKLLKEIEKSSEDHRRRVEELLREIDR

SEQ ID NO: 11453 - protein, 182 aa, Artificial Sequence; identical to SEQ ID NO: 11452
  Synthetic

SEQ ID NO: 11454 - protein, 177 aa, Artificial Sequence
  Synthetic
SEEEEVEEELERHHRDVEEYVKRLKELLDKLRRKNETTVRDIARLAKKHHDDVDELKKRNIDEETKDRLREKTEELKRRLEEVKRRLEEEHKRAEDKAREDNERKKRESDRKEEELRRRNVSREVLKRFKDKVKENRDESERVHREIKERLEELKRKNEDVLRKVKKILDDNEERLR

SEQ ID NO: 11455 - protein, 177 aa, Artificial Sequence; identical to SEQ ID NO: 11454
  Synthetic

SEQ ID NO: 11456 - protein, 180 aa, Artificial Sequence
  Synthetic
KDLEKLVEDIRRLLEELKKTVEDNKREIKELLDRLREKVKENLKRHKELNKRLRDTGAVSEDELRETEKKSRELEKRSRDLLKKLEERVEEIERRSDEELKRLEDRVRKIEDDLRREGDRGKEVKDRIEEVLRELREAVRRHHEKVKEVLRELKEALDKHHKDVTDSLRDVERLVEEARR

SEQ ID NO: 11457 - protein, 180 aa, Artificial Sequence; identical to SEQ ID NO: 11456
  Synthetic

SEQ ID NO: 11458 - protein, 174 aa, Artificial Sequence
  Synthetic
SEKEILDEIRDRIRKLLEEIKDYLEKSKKKIRDLLEKIKKVLEDNKERVDRLLDVIRKNRIRDEDLKKAIEEDERRLEKIRRELEKAKRDIEKANEELEEKLRRAATKIKEDLDRKNIDDDVRREAKRLLEEVAEAVRRIHETSKRLLERVDEEMKRVEETIRKTNKEVEDAKR

SEQ ID NO: 11459 - protein, 174 aa, Artificial Sequence; identical to SEQ ID NO: 11458
  Synthetic

SEQ ID NO: 11460 - protein, 176 aa, Artificial Sequence
  Synthetic
SDVEKLIRDAEKKMDDFRKDSERLVRELEEKLKRHEERVRDLLRELKELLEEVRRKDSRDEELRRLEEEIDKKLEEVDRRTEELKRRIDKELEDHRRKLEKLREELDRTLEDLVRKKGRSSEKIKEAVDRIKKALRDSHKELAEVVERIKRKLDETNRELKDEARKIKEELRRVEK

SEQ ID NO: 11461 - protein, 176 aa, Artificial Sequence; identical to SEQ ID NO: 11460
  Synthetic

SEQ ID NO: 11462 - protein, 182 aa, Artificial Sequence
  Synthetic
SEVETVKKRLEDSTKESEDTVRKVKRELERLIERSEDTLRRIKKRLDDLIRTIEDLKRRGNSDDRMEKRLEDELKKIEDELRKYHEEVKRKLDELRKELRREDERVTREHDTLREELTRREGGKELLDTLRRLLEENKRRHKETVDEIERLIKEVERANREILTRIKKALDDVRRAVEEIKR

SEQ ID NO: 11463 - protein, 182 aa, Artificial Sequence; identical to SEQ ID NO: 11462
  Synthetic

SEQ ID NO: 11464 - protein, 174 aa, Artificial Sequence
  Synthetic
REVEEVLRKVREDSKRNKDELKRLLDEARKESEDNKRDLEKLLKEVREEVRRVEEILRKTRIDDEELERLKKRVREAEKRVEDRTRELEKRVREVEKEVKKRNRDMEETVKDIRRKLKDEDVLREIETLLDKNHKDNKKVLDDIRELLKENADRNRRVLEEIKKLVEDVERKVK

SEQ ID NO: 11465 - protein, 174 aa, Artificial Sequence; identical to SEQ ID NO: 11464
  Synthetic

SEQ ID NO: 11466 - protein, 179 aa, Artificial Sequence
  Synthetic
DEDEKALREIKKLIEDNERLNREVNERIERLIDRARRLMERVNREIERLIKEVRERLGEEDKRAREILRRLKEELKKHKKESDDLLEKLKRRLDEHRKDSKRSKDDLKRELDRVAAKRLRGEELEKTLRDIRKRSKEDADKVKKSLEEVEEEIRRIEKRLRESLKKVEDDIERIRREAT

SEQ ID NO: 11467 - protein, 179 aa, Artificial Sequence; identical to SEQ ID NO: 11466
  Synthetic

SEQ ID NO: 11468 - protein, 176 aa, Artificial Sequence
  Synthetic
SEIEKLTKEIRDLIRTSREEIKKLMEELERNVREAEESIKRLLEKAEELIRRIAEENKDVRELLKKLEDDLRELAKELKKVVEDSRKKLKELIDELKKYIEDLDEELRRLEDVLRRNQTRKEDVKRELERIKKSSDDVRKKVEDESRKHREEVERLERELDRKLEDIRRKVEETKT

SEQ ID NO: 11469 - protein, 176 aa, Artificial Sequence; identical to SEQ ID NO: 11468
  Synthetic

SEQ ID NO: 11470 - protein, 186 aa, Artificial Sequence
  Synthetic
SEIEKLAEDVERIAKKIEDVVRELRKANEDIIKEVRDINKELRDKVEEILRRIEKIVRDRLKDDKDEIDKVERDIERIRDEIRKSSKRVEDTIRRSERETDKLAREVEDTIERIREELEEVKRRQVDKEILDRIRKKLRETLERVRDRLRKYLEDLERRLEELRREHRKTLEELKEKLKRLADRVK

SEQ ID NO: 11471 - protein, 186 aa, Artificial Sequence; identical to SEQ ID NO: 11470
  Synthetic

SEQ ID NO: 11472 - protein, 178 aa, Artificial Sequence
  Synthetic
SEVEDLERRAREVNKRIKDLIDRLRERVRKIEEDIRRLNKELKEEVDKIIEEIRKDGGENREEVRRLEEEIKKKIEESNRDVERVIKEIREKIRELKKRADDLSEESKRKIEEVRRVRDGKLIEELLREHEKMLKEIEDRIRKIERELDELLKTLEDKHREILDELEKELRKAKERRR

SEQ ID NO: 11473 - protein, 178 aa, Artificial Sequence; identical to SEQ ID NO: 11472
  Synthetic

SEQ ID NO: 11474 - protein, 182 aa, Artificial Sequence
  Synthetic
SDIERILEENEKTNRENRKRIEDIRRELEERLDRNRRRIEEILRRAEKMLEEIEDIFRRSDISEDIVREAEKTLRDIKRELDENLRRNEETARRIEEELRENLRRNEEKHRRIEKRLDEKVRDEDKLRDLKKKLRDSLRTLEELHRKLKKDLDEILRRLEELHRKLKEDLDRILKAVRDTAK

SEQ ID NO: 11475 - protein, 182 aa, Artificial Sequence; identical to SEQ ID NO: 11474
  Synthetic

SEQ ID NO: 11476 - protein, 182 aa, Artificial Sequence
  Synthetic
SEIEDIKRRNEENNRRNKKRIDDILEELKRRVEENRRRLEDIERKLREDKERLKDIFRRSRIDDKAVEEAKRRLERIKEELEKNLTRNKDDAERIKRELDENLKRNEELHRRIREDLRRRVTDEDKLRKLEEDLRRSLETLREIHRKLKEELDRILEELKRLHERLKRRLDEIADEVARTAR

SEQ ID NO: 11477 - protein, 182 aa, Artificial Sequence; identical to SEQ ID NO: 11476
  Synthetic

SEQ ID NO: 11478 - protein, 182 aa, Artificial Sequence
  Synthetic
SDIEEIERRNRENNERNKRRIEEIEKRNREENKENEKDIERILRRAEELLKRAKEILRESDISEEVLKEMEERIKRIKERLERNLRRNAERHKEIKKELRENLERNRELHKRIADELRRRVRDEKKLRELKKKLDDSLRTLEELHRELMKRLDESLKTLKELHDELKERLDRILKEIRDDAK

SEQ ID NO: 11479 - protein, 182 aa, Artificial Sequence; identical to SEQ ID NO: 11478
  Synthetic

SEQ ID NO: 11480 - protein, 182 aa, Artificial Sequence
  Synthetic
SELEKTLEDLKRHSEENKKKLEEDLRDMERNLKENKDRLKKILEEAEKTLKDLERRFREGDIDERELERVRRKMEEIKKRLDENVERNRRKAEDIKRKLDENVKRSEDRVKEIKEDIRRRVRDKDKAEELERRLDELVKENREIHERVKKALDDIVKELEELHERLKRRLEEILRRIAETVR

SEQ ID NO: 11481 - protein, 182 aa, Artificial Sequence; identical to SEQ ID NO: 11480
  Synthetic

SEQ ID NO: 11482 - protein, 175 aa, Artificial Sequence
  Synthetic
SSVERFEKAVKESIENIRRLLEELEREIRESMKHLRELVKELKEALDRIVERLRRTVRDEDELRELIKELEDIVRRAEEKLERYRKRLEDLIDEARRTVEDVERRHREKIEEVRRRNRVEEEDLKRLDKENKDIEKKIRDLVKEARDENRKLKRDIERTLRELEERLKEVEDRET

SEQ ID NO: 11483 - protein, 175 aa, Artificial Sequence; identical to SEQ ID NO: 11482
  Synthetic

SEQ ID NO: 11484 - protein, 179 aa, Artificial Sequence
  Synthetic
SDIEKRLEENERHNERSEERIRELLKELEDHLRRTKREIEKKLEDLKRLLDRLREEDVKREEALRDLAEKVKKIKRELREHHERNRRKVEEIKEELRKHHEDNKETHERIKRDLDRKIRGNEELKRVKDELDKSLKHSRELIERAKERLEEIKKRSKELVDRAEKRLDEILKEVKDDFD

SEQ ID NO: 11485 - protein, 179 aa, Artificial Sequence; identical to SEQ ID NO: 11484
  Synthetic

SEQ ID NO: 11486 - protein, 179 aa, Artificial Sequence
  Synthetic
DEIKEREDDVKRHLDRTREEIEKLLKEMEEHTERSRRKIKKVAEDAEERLRKVEEENSKDRRVLTKLKEDVERLKEELKEHLRRNKKTVEDIKRELREHLKRNKKRVEDIKRELDRDIRGNKELEEVKRKLDRILEESEKLVREAEKRLDELLKDNKRLVEELEKELDRILEELRKRVD

SEQ ID NO: 11487 - protein, 179 aa, Artificial Sequence; identical to SEQ ID NO: 11486
  Synthetic

SEQ ID NO: 11488 - protein, 176 aa, Artificial Sequence
  Synthetic
DSIEDLERRAKESDDHLEKLIRELRDELRRSLETVRRNIEDLRRTLEEVLRRLEEDGADKDLLKDLADKVDTIRKELERSLEEHRKRIEEIEERLKDLHRRHRERIEKIKKDLKDVGEEMLREIKKELEETNKRAEDDVRKIREELREHNERHKERSKRIKEELKRTLDELKKKRK

SEQ ID NO: 11489 - protein, 176 aa, Artificial Sequence; identical to SEQ ID NO: 11488
  Synthetic

SEQ ID NO: 11490 - protein, 186 aa, Artificial Sequence
  Synthetic
SRIETLVRRMKELLKEVEDKSEKSKRRWEDRLKKVAEDSKRRVEEMDRELDEVRRKRERGDRDRKEFSDELRKIKEELDKKLREHHERIKEIEKELEDENRKHHEEIKKIKKELDDIVKEAAEEGADERLLRELKRIVDEVKKELDRLDTEHNKAIEDVKRELRKLDEEVRRIVERVKRELDRLEK

SEQ ID NO: 11491 - protein, 186 aa, Artificial Sequence; identical to SEQ ID NO: 11490
  Synthetic

SEQ ID NO: 11492 - protein, 186 aa, Artificial Sequence
  Synthetic
SEIEDLIRRIRETLKRVEEDSRRSKEEAKRKLDKVKEDSERLVEKMRRDLEKVKRETDKGDRPDEDLRRKLERIKKELERELKEHHDRIERVKRDLRRLNREHHEKIRKIKEDLKRILDDAARKGADEELLKRLKEVVEDVIRKLDRLDKEHTEIVEEVERRLDKLDKDVERIVEEVKKALDETEK

SEQ ID NO: 11493 - protein, 186 aa, Artificial Sequence; identical to SEQ ID NO: 11492
  Synthetic

SEQ ID NO: 11494 - protein, 186 aa, Artificial Sequence
  Synthetic
SEIEKLIEDIRRRLKKLEDESRKSVKDARDMLRRVEERSRDSVRKMREELERVEDESRRGDRPKEALEEIIRRIKKKLDENHKRHHDEIEKIKEELERLNREHHDRVRRAKEDLDRILEKAAREGLDDELLKRLEDVVRDVKRKLDELDERHTRIVEDVKRRLDDLDREHRKIVEEVKKELDKLLK

SEQ ID NO: 11495 - protein, 186 aa, Artificial Sequence; identical to SEQ ID NO: 11494
  Synthetic

SEQ ID NO: 11496 - protein, 186 aa, Artificial Sequence
  Synthetic
SEIEKLIEELRRELEKVKDELERSIEEMDRELDDVRRDSKRLVDEIKRELREVTERTKRGDRPEEVLRKELEDIKRKLRRILEEHHEKIRRIKEKLRRENKRVRDELKRIKDEIDEKVKDVRRKGADEELLKRLEEVAEDVKRALEELLKKHTRVVERVEKALDELDKELERIVREAEKELDRREK

SEQ ID NO: 11497 - protein, 186 aa, Artificial Sequence; identical to SEQ ID NO: 11496
  Synthetic

SEQ ID NO: 11498 - protein, 186 aa, Artificial Sequence
  Synthetic
SEVEEEEKTAEKILEEVAEEIKESIKRIREEVKKNEDDSERSVREMERRLREVEERIRRGDKPKEAVEKEVREIKDELRRNHEEHHRHLRRNERRLDRENEELRRRLEKIKKELEDRLRRLAEEGQDEELLRRLKRVVERVKERLDRLLEEHTRVVEEAKERHRELDERHEKIVRDVVRELDRRVK

SEQ ID NO: 11499 - protein, 186 aa, Artificial Sequence; identical to SEQ ID NO: 11498
  Synthetic

SEQ ID NO: 11500 - protein, 186 aa, Artificial Sequence
  Synthetic
SEVEKVVKELEDELRRVAEDSERSIREMEKRLDDFRKRVRETAEKMKEDLRRVEERARRGDQPEEALTRELERIKRELEKKLREAREDVKRIKDELEKLNREHHKKIKEIKDELRRTLDKLRKDGLEERILKRVEDIVRRVEEELDKLDEKHTRVVKKVSDALDRIVEELEKIVREVAKRLEDLRK

SEQ ID NO: 11501 - protein, 186 aa, Artificial Sequence; identical to SEQ ID NO: 11500
  Synthetic

SEQ ID NO: 11502 - protein, 186 aa, Artificial Sequence
  Synthetic
SEVEKKIEEMRRTLDEARRRSEESKREIKKELDEARKRVEESLKRLRETLKKVEDERRRGDTDKEELKRRIERIKRELDENHKRLKKELEEIKERLRRKNEEHHKEIERIKRELEKKLKDLERKGLEERLLRRVAKVVEDVKRELDRLDEDHTRAVEEVERALDDLLKKHEDVVREVKTELEKLLK

SEQ ID NO: 11503 - protein, 186 aa, Artificial Sequence; identical to SEQ ID NO: 11502
  Synthetic

SEQ ID NO: 11504 - protein, 176 aa, Artificial Sequence
  Synthetic
SELEELIRDIERKLEKVKRDSERSMREIEEDLKRVRKKTEESERRIRDLLDKVRKRKVDKDKLKRIKEELRKLNKDHRDDIERIKRRLDKLNKEHREEIERIKKELRELVKRVEDAGLDRTEDLRRVAKRVEEELDRSNEEHSKIVDKAKRDLDKSNKEHSKVVEDAERTLDRVED

SEQ ID NO: 11505 - protein, 176 aa, Artificial Sequence; identical to SEQ ID NO: 11504
  Synthetic

SEQ ID NO: 11506 - protein, 176 aa, Artificial Sequence
  Synthetic
SELEELEERIERLLEKVRRESEKLLRELEKKLKDVERKIEDSIRKIRDDLRKVRERKVDREKLEEIKRKLEKLNDEVRDDLRRIKREIAELVKTHEKRIREIKEELDRTLERVERTGLDRTEDLRRVLDRVKKDLDRSNEEVRREADRIMKELDKLLKKHSDVVKEVLEALDDTDR

SEQ ID NO: 11507 - protein, 176 aa, Artificial Sequence; identical to SEQ ID NO: 11506
  Synthetic

SEQ ID NO: 11508 - protein, 182 aa, Artificial Sequence
  Synthetic
SEIEEIKRRLEETNKRVREKNKRSVDRIKEHLERSRRRVEEIIRRIEKLLEELEEKARRTDISDDVIRELKKRLEDILKELEEHHKRNKEDSDRNRKELEETLRRLKKKHEDIKRELEKMDVDEKLLRDLEKALRDSIRTLKRSVEENDRINKEANEDSERLLRELKKVLEKAKKDVDELRR

SEQ ID NO: 11509 - protein, 182 aa, Artificial Sequence; identical to SEQ ID NO: 11508
  Synthetic

SEQ ID NO: 11510 - protein, 184 aa, Artificial Sequence
  Synthetic
SLEEELRELARRLKEEVRKLEETLEKVLEDSARNIKRLIDDLKRVNDELRKRVDDLIREVGDKETVDRMKKEIDDSSKEVEKLVRELEKEVDDLRKEHEKLVRDIRRKIKELEDEIRDLERKRIEKEALDRVRKKLEDALKKLRDEVREMKKKNDKTNKEVKDKADELRKKHEDTLEELKKRVK

SEQ ID NO: 11511 - protein, 184 aa, Artificial Sequence; identical to SEQ ID NO: 11510
  Synthetic

SEQ ID NO: 11512 - protein, 178 aa, Artificial Sequence
  Synthetic
SEVDEIIKRIEDLLKEVRDESKRNEDRIREKLKRLKKKSEDNAEKIKDELKKIRDRKVDDEEIKKIKEELRENLKRVEEDVRRIKEDLDRNLDEVRRRLEDIKRKLEEMLKDAERRGEPKEVLDTLRDAIRRVKEELDRNLEKNTELIKRVKETLDDLLRRNKELIRKAEETLDEERR

SEQ ID NO: 11513 - protein, 178 aa, Artificial Sequence; identical to SEQ ID NO: 11512
  Synthetic

SEQ ID NO: 11514 - protein, 182 aa, Artificial Sequence
  Synthetic
DELEKIRKELEDLSRENKEKLERIARELKRLSEENTETLEKLKEEIRRLLEKLKRIVEKDGTRDELIKEIEDELRRLLDEVRKNVEDNKRKLDEIRKEAEKDLRDNERKLEEIERRARKRGLPKEMLDRIKELLDTHRRILEDIKREIDKLLEDHRRRLEELLRDLKRALDRVREEVDRLRR

SEQ ID NO: 11515 - protein, 182 aa, Artificial Sequence; identical to SEQ ID NO: 11514
  Synthetic

SEQ ID NO: 11516 - protein, 176 aa, Artificial Sequence
  Synthetic
DDVRRIEEEIRRTLRELRETLKRVERRNREENEDLKDKMRRMKKENEDTNERVKKEGGGGEELKRRVEELARRHEKLVREIRKRLRDLAEEHKKLVEEIKRKLDEIRRRIEEAKRRGTEDKERLDKLLEDLAKEARKVIEDLKEILRRTKESIDEVEKTLREILKKSKETADRVET

SEQ ID NO: 11517 - protein, 176 aa, Artificial Sequence; identical to SEQ ID NO: 11516
  Synthetic

SEQ ID NO: 11518 - protein, 176 aa, Artificial Sequence
  Synthetic
SDLERLKKRNDDANRKLKETLDRVEKENRDVNRKLEKELKEVEEKNRRENKKVRDRGGGGKELEDRVRELKEEHERLVEEIKKELEELEKRHRKLVRDIEEIVRTLAKEHEDMKRKGTDDKEELDKILTRSEEVARRIIEELKKILEETRKSAERVIRRLEEILKESEREVREVET

SEQ ID NO: 11519 - protein, 176 aa, Artificial Sequence; identical to SEQ ID NO: 11518
  Synthetic

SEQ ID NO: 11520 - protein, 178 aa, Artificial Sequence
  Synthetic
SEVEETIKRVRDTLKKHNEESEKAIRELEEELKRLDDKNREAVEDVKRTLDELRRTKSSEDTLRKVLDKLRRDVERLVREHEAVLKKLEDRIRELKEKTKKVLEEVARIVTEVERKVKDKDLRKRLEELLREVEEDLKRNIEKLDKALKEAKEVIERSIEHLRRVLEEVERVLRELAR

SEQ ID NO: 11521 - protein, 178 aa, Artificial Sequence; identical to SEQ ID NO: 11520
  Synthetic

SEQ ID NO: 11522 - protein, 182 aa, Artificial Sequence
  Synthetic
RKEDEMRKLLDEIEKDLKRNDERVRRVLKRSKENLRRLEERAEKLLETVEREIKRLEEEGKIREDEARELRKRLEDRRREVKRELEEWERKLKEILDEVRESLKRVRERLEEIRERMEKEDRDEREVKRTIDELKDELRKHNDKTEKLIRRARETDKELNDRVAKREEEARRELEEVDRRVR

SEQ ID NO: 11523 - protein, 182 aa, Artificial Sequence; identical to SEQ ID NO: 11522
  Synthetic

SEQ ID NO: 11524 - protein, 182 aa, Artificial Sequence
  Synthetic
SLEEAVEKLLRDSEENLKKNEEDVRRLLKKSKENADRLRDEVRKLLETAEREIKRLEDEGKISEEEAKKLREELKRILDDVDKKLREWERALEEIERKVKRSLEEWRRELREIKDRVKKEDLDERLIRETEKDVKRRDEEHNTRTEREIREAKKEDEKLNKEVRDTEKRLRDELRRVEERVR

SEQ ID NO: 11525 - protein, 182 aa, Artificial Sequence; identical to SEQ ID NO: 11524
  Synthetic

SEQ ID NO: 11526 - protein, 182 aa, Artificial Sequence
  Synthetic
SKEDKVRELLRRSKENLDRVREEVRKLLKKSRDTLEELRERAKRLLEEVEEVIKRLEEEGVISEDTARRLRKALEDIKRDVERSLKEWEDRLREILEDVRKELEDWARALDEIRKRVEEEDRDEKEIEETIRRVEDMDRRLNERLRKKIEDAERMDEALRERVERLIRRVRKELEDVERRVR

SEQ ID NO: 11527 - protein, 182 aa, Artificial Sequence; identical to SEQ ID NO: 11526
  Synthetic

SEQ ID NO: 11528 - protein, 174 aa, Artificial Sequence
  Synthetic
SELEEVARRIEKMIRDLEKDLRELERKVRESDERLKRDLERNEKEHRDTIEAMRRREPDSRVDEEVKRLEDKNRKKNKEVKDESRDLKRELETTLRRIEKEIKKIEDDVRRREGDKDVRDALKKLLDELKKAVEDVRREIERLIREHKRVTEEVERADKELNDRTRKAADELRR

SEQ ID NO: 11529 - protein, 174 aa, Artificial Sequence; identical to SEQ ID NO: 11528
  Synthetic

SEQ ID NO: 11530 - protein, 175 aa, Artificial Sequence
  Synthetic
EEVERLEEEVRRRKKEWEDRLEEVKRRNEKAKRESERENEKIAREVREVVKELRERGGGGEELRKRLEDLARKLEKYKEELRRRSRKMAEEVERVKKELRERNEELARRVEELERAGADKRRLEELLRDHSRMIRRVEAELDKSLEDHKRALDENEKRIDEWLERLRKIVEEVEK

SEQ ID NO: 11531 - protein, 175 aa, Artificial Sequence; identical to SEQ ID NO: 11530
  Synthetic

SEQ ID NO: 11532 - protein, 175 aa, Artificial Sequence
  Synthetic
SKIEEIERRVRELEETWRRKLEEVEKDSRRSVKKMEEDLERAARETEEIKRRLREEDIREEELKETVDRHHKKIEEIKRELEKENKDHHKKIRDVERELDKANKELADDMERVKKDNGDERKLEELLRKHNEVIKRVKEELKRLDKEHTDIVEEVKKELDKLDEDLKRVADEKRK

SEQ ID NO: 11533 - protein, 175 aa, Artificial Sequence; identical to SEQ ID NO: 11532
  Synthetic

SEQ ID NO: 11534 - protein, 175 aa, Artificial Sequence
  Synthetic
DEDEDLERLLRKLKRVLDEIRKRIRENIEENREVVERAAREVKKSIDENRKVVDDVQLPDEELRKLREDSERKVREIERRIEEIKKDSDRLARELEKTLEDLARKVEKTERELRREGGKGEEVRKKIEDLERELRRTLEEIHKENEKSKRKIEKALRDIREENKKHIREIEETKR

SEQ ID NO: 11535 - protein, 175 aa, Artificial Sequence; identical to SEQ ID NO: 11534
  Synthetic

SEQ ID NO: 11536 - protein, 182 aa, Artificial Sequence
  Synthetic
SDIETLTRDVERSIKELEDHLKKHHEEVKERIRRLEEHADELRRRAEKLKEELKRMKDRGDSDEEVLKDILRRVKEEVDRVKKTNEDLEREVRDSEEKVKEKNRRHKEEIKKRVKEMKDRDTKTKVEEDVKRLVKKLDEVNERHRREIERNRKELEDVSRRHKEKVDRILEDIKEALDRVRK

SEQ ID NO: 11537 - protein, 182 aa, Artificial Sequence; identical to SEQ ID NO: 11536
  Synthetic

SEQ ID NO: 11538 - protein, 178 aa, Artificial Sequence
  Synthetic
SESETVKKENEDHIRKLEDDLRKLEEDNKRHVDDIERRLRDLKRENERFAEEVKKRGGGGEELKERLKELERRHEEELKDLRRSHEEYAKRVEEVLRRARRSSEEVERKLDRIRKEIDDEEVKKTLETLVRTNRRAIREVERRLKESLDHNREVLKRAEEDLRRSIRHLREVVREADR

SEQ ID NO: 11539 - protein, 178 aa, Artificial Sequence; identical to SEQ ID NO: 11538
  Synthetic

SEQ ID NO: 11540 - protein, 185 aa, Artificial Sequence
  Synthetic
SIEDELRELKERLERVVEELRRLHEKTIEDLKRVVEKSEKTLRDIRRELERVVEEVRRRRKDLEELLRRLDKKLTELEKELKKLLEDHRRVLRRLTEENRKALEKWEELLRRLTKELKEVKDRRVDKEVLDRLRKKVEDTIRKMKDEAKKLDDEHKKAVRRLEERNEETARRVRKAVEDIERETK

SEQ ID NO: 11541 - protein, 185 aa, Artificial Sequence; identical to SEQ ID NO: 11540
  Synthetic

SEQ ID NO: 11542 - protein, 185 aa, Artificial Sequence
  Synthetic
SIEDILRKLTKDLEDVIRRSRKTSEDLKEELKRVLDKHKEKLDRILEDVERVVREVEERRKDLEELKKRIRDELRKIKKRLEESLKRTEETLRELERRNRELNERHERTAREVRKRLEEVREKRVDKEILDRLEEEVRRLIEELDKENDEARKEHREVAKRNEEEIKKLEEEAKDSIRRLREESR

SEQ ID NO: 11543 - protein, 185 aa, Artificial Sequence; identical to SEQ ID NO: 11542
  Synthetic

SEQ ID NO: 11544 - protein, 178 aa, Artificial Sequence
  Synthetic
RESEELDKRLKEIAKDIRDKLDEIRRENEKTAKEIEDTIREIERDNERIDREMERRGGGGEEVERRMREAKRRHDKILKDIEDRIRTLERKHDEILKEIRREIKRVEEELREREKERDDKRFKDVIRRLEEELKKLLKRAEEEIRDSKRHLRELLKKVEKVIRESKANLDRTLKKLRD

SEQ ID NO: 11545 - protein, 178 aa, Artificial Sequence; identical to SEQ ID NO: 11544
  Synthetic

SEQ ID NO: 11546 - protein, 185 aa, Artificial Sequence
  Synthetic
SEEEDLRRKVEELEERVERYKEELKKEIERIETENKRHVEELERRLRKIAREVDDAKRRQLSREEVEEMLRRLEDALRRIEKNVRDVNRRSKKELEELERTSKEVLDRIEESLRRLAEEVKRSPRTEDLDRLLDEMRREAERLLDELRKVTERIAREVKRSNEENKKVLDEIRKAIKDLLDKLRK

SEQ ID NO: 11547 - protein, 185 aa, Artificial Sequence; identical to SEQ ID NO: 11546
  Synthetic

SEQ ID NO: 11548 - protein, 179 aa, Artificial Sequence
  Synthetic
STEEKVEEDLRRLEEKNRRHVREIEERLERMKEENRDHVRKLEEKLRRLDEEVRKVKEGGETKDEELRRLEEELRRTLEELRRSVDKSRKDHRREEETITRSHEKLEEEHRRVLDDLRKKIRNRETLKRAERKLRESLRHNREVLERARRELKKSLDHNDKALEDAERRIREIREELEK

SEQ ID NO: 11549 - protein, 179 aa, Artificial Sequence; identical to SEQ ID NO: 11548
  Synthetic

SEQ ID NO: 11550 - protein, 180 aa, Artificial Sequence
  Synthetic
DLKEVLDKLRELVREVTERIKRTIEEIERLLRKVEREMRETIRTDEELLKTVVDELRRKNADERLLRTVTEASKTSIKLNEDLMREVERAVREVIRINEELLRRVREVAKRVLEIIKNSTDRRKIKKVLDDLRKIIEDIERESRESLERLREIIERLKRRSDKTLKDSKKVIDDIRRRTK

SEQ ID NO: 11551 - protein, 180 aa, Artificial Sequence; identical to SEQ ID NO: 11550
  Synthetic

SEQ ID NO: 11552 - protein, 180 aa, Artificial Sequence
  Synthetic
DLEEVLEDLRRLMEEVKRRIERTIEEDKRLLDEVERRIRETIRRDRELLKEAERDLREKRVDERLMDTVRRVSEESVRRNEKLLREVKRVSEESIKINEDLLKEVTRVAKEVLKIIRRSDKRDKIRKVRKELREIIDRIRRESERSLEESRRVIEKIDEKSKRTLEESRRVIEEIKEKAR

SEQ ID NO: 11553 - protein, 180 aa, Artificial Sequence; identical to SEQ ID NO: 11552
  Synthetic

SEQ ID NO: 11554 - protein, 169 aa, Artificial Sequence
  Synthetic
SSEEMLRTVEELIKEARKRLDESLEEVRKRIEDAKRRHEESNDENRRLVEDAKRRVNTEEAKKRIDEVLKKSEEVNRKAKKDLDEVLKEHERVIRRIKKELDEVLEKVRRLGEDKDVLEELREIIDRLRRESEDSLRRLEKIIKDSEDRSRESSEELKEIIKRLLEEDK

SEQ ID NO: 11555 - protein, 169 aa, Artificial Sequence; identical to SEQ ID NO: 11554
  Synthetic

SEQ ID NO: 11556 - protein, 169 aa, Artificial Sequence
  Synthetic
SKDEVLEEVERRIRTAERDLERMVRRNEELIRDAKREHERSNRENERLVTEAKREIDIEEVKRELDEVLKKSKRVNDKAKEELDRVLEKSKRVADEIRRLLREVLDKVRKLGNDKDVLDELRDIIRRLREELKKSSDDLERIIRRSVKESRDSSEELRKIIEDLKREAT

SEQ ID NO: 11557 - protein, 169 aa, Artificial Sequence; identical to SEQ ID NO: 11556
  Synthetic

SEQ ID NO: 11558 - protein, 169 aa, Artificial Sequence
  Synthetic
SEKEVLDEVKELIERAKERLRRMLERNERLVRDAERKLKRLLDEDRESIERVKKRLDIEEVKRLLDKVHEKSKRVAERLLDELRKVLKKSEKVIRDITRTLDEVLKKVEELGRDERVLEELKKEIRRLEEEVKKSSEELERIIEKLLEELKRSLEESEDIIRRLEEETR

SEQ ID NO: 11559 - protein, 169 aa, Artificial Sequence; identical to SEQ ID NO: 11558
  Synthetic

SEQ ID NO: 11560 - protein, 169 aa, Artificial Sequence
  Synthetic
RKDELLRRVEEEIKKVKKRLKEMLDTDRKLIEDAERKLEEAERRDSDLIRRAKERVRDERVKEDLDRVNDKSREVVDRIKKKLREVHEKSREVVERIEEELDKVLKEVRDLGEDDRVLEELERIIEELKREIEKSLRETEKIIKELEDELRKSLEETERIIRKLEEESK

SEQ ID NO: 11561 - protein, 169 aa, Artificial Sequence; identical to SEQ ID NO: 11560
  Synthetic

SEQ ID NO: 11562 - protein, 169 aa, Artificial Sequence
  Synthetic
RSEEVLREVEKAIRRAKEELKRAVETDRRRNTEAARALEEILDTDRRLIEEAKRRLRIDDVKRLLDEAHDKSRKVVEDAKRLSNEASKRSEDVAREIEKLLDDVLREVEKLGDDEKVLRDLKKIIDDLRRRIEESLRDSERIIEKLRRDLEASLEESRRIIERLKEKAD

SEQ ID NO: 11563 - protein, 169 aa, Artificial Sequence; identical to SEQ ID NO: 11562
  Synthetic

SEQ ID NO: 11564 - protein, 169 aa, Artificial Sequence
  Synthetic
REKELLDKVKELVERAKRELERLVREDDKLNEDLKRRLTKILKEDSDRIKEVKERLKDEEVKKKLEEVNKKSEDVIRRIVEESDEASRKSKEVAKKLLDDLDRVLDEVRKLGGDDKVLEDLRKIIEDLLREIEESLRESREIIKKLEKRAKDSLKETEEIIEELERRDT

SEQ ID NO: 11565 - protein, 169 aa, Artificial Sequence; identical to SEQ ID NO: 11564
  Synthetic

SEQ ID NO: 11566 - protein, 182 aa, Artificial Sequence
  Synthetic
SEVEELLDRVKKVADESRREAKRLLDESKRVIDKSLDEVRRLLKESREVIEEVKKRVDEKRDLREMVKRLLEELKKISRESIERNKRLLEDLRRISRESLEANKELLRTLKEIVDKVIRDIRRRNADEVLKRLEDLLRKVAEEHRRITREDEELLKRAEEEHERFSKEDEDLLRKAEKEVED

SEQ ID NO: 11567 - protein, 182 aa, Artificial Sequence; identical to SEQ ID NO: 11566
  Synthetic

SEQ ID NO: 11568 - protein, 182 aa, Artificial Sequence
  Synthetic
SRVDELVKRVRDVAREVKRINDELLKRVEEVIKESRDRVRELLKKVEDVIRRAAEEIDRIRRDREVVKDLLRRLKEDVDEVIKDNERLLEEVKRIVEDVVRKAEKTLEDLRKIVEDVIRDLDRDRAKEVVREIEKLLEDVRRTSEDTVRKIRELVAEVDDDHRRASETIRRLLKEAEDRARK

SEQ ID NO: 11569 - protein, 182 aa, Artificial Sequence; identical to SEQ ID NO: 11568
  Synthetic

SEQ ID NO: 11570 - protein, 182 aa, Artificial Sequence
  Synthetic
SEVEELLKDVERVIKRSEDEVRRLEREVEKSSEDVERINRKLLRDSREVIKKVIEDVRRVKDDKDVVRKLLEDLRRISEKSVEDMKRTLDRDREIVDKVLKENERLLEELEEIVREVERRLDERRAKEVLDRIRELLETARRRHKEATKKIKRILEESEKKSRRSIEEDKRLLDEAKEEVRR

SEQ ID NO: 11571 - protein, 182 aa, Artificial Sequence; identical to SEQ ID NO: 11570
  Synthetic

SEQ ID NO: 11572 - protein, 181 aa, Artificial Sequence
  Synthetic
SVEEVVRDNERRLEEDAERTRRVARRIEKLLDELRKKVEDVIREAKERLERLLEEIGEESDVIREVEERVKKLLKRVTDLLDKVRREVEKLLRELEESLRKSEEDVRRSIEDVKRKMSDERAEDLLREVNKRNEEVIRRNKELLDEVEKRIREVIKRLEELLEKVKRELERVADELRKAKK

SEQ ID NO: 11573 - protein, 181 aa, Artificial Sequence; identical to SEQ ID NO: 11572
  Synthetic

SEQ ID NO: 11574 - protein, 181 aa, Artificial Sequence
  Synthetic
DVERVLKENKETLDEDRKRTKEVIDRNKKKLEDLAREVRKVIEEIKKRLKELLDKTGEESEEIRDVERRVRKLLREVEEALRRVEELARRTSEEAKESLRRSEETVKRSIDEVRRKMSREEAEELLRRVNKDNEKVVRENEKLLKEVLDDSERVIKELRDLLEEVRRRIEKVIRDLEERRR

SEQ ID NO: 11575 - protein, 181 aa, Artificial Sequence; identical to SEQ ID NO: 11574
  Synthetic

SEQ ID NO: 11576 - protein, 177 aa, Artificial Sequence
  Synthetic
STDEFIERLKKILRENEEKVKEVLKRNEDLLKEDEDRTRKAIKELEDKLRRVKERVERQRADERVLRELKRVVERILEELKKSLEKSKRISEEDIRAIDEWLKRSETMVRRLLKLLRDGVDVKEIEKELRRVSEESERELRKHDENTKRVSEENKERIDRLRKTLDEVIERAEERAK

SEQ ID NO: 11577 - protein, 177 aa, Artificial Sequence; identical to SEQ ID NO: 11576
  Synthetic

SEQ ID NO: 11578 - protein, 177 aa, Artificial Sequence
  Synthetic
SLDEVIRRLEETLRKDEEDTRDVIRKVRRILEENRKEVKRVIDELRRRLEEVKKRVEDSKMDERVLRELEKVVRDILRRIDEVAKESERVVRRVEEEARRSLKESKEMVERLLKLLRDGVDADTIREELRKVLEDNKRILRRLLEELKRVSEESRDRLRRLKEELERVIEEVERRAK

SEQ ID NO: 11579 - protein, 177 aa, Artificial Sequence; identical to SEQ ID NO: 11578
  Synthetic

SEQ ID NO: 11580 - protein, 186 aa, Artificial Sequence
  Synthetic
SIARKVLTDLRKIVEDLERDVERSDRDSERVVREVLERNEEVLKRLRDIVEEIKKVIREVRKDREVLKELVDRAKEVVERVKKITEELLEEVADVVRKSKKRLEDLLEELRKAVEEVKKILDRDVEDRDDVERIKRDLERILKEVARKATESVKRNERILEEVKRHAEKSTEDVERLLRELEDTVR

SEQ ID NO: 11581 - protein, 186 aa, Artificial Sequence; identical to SEQ ID NO: 11580
  Synthetic

SEQ ID NO: 11582 - protein, 186 aa, Artificial Sequence
  Synthetic
DEIEDALREARRVTEEVRREIEKSDKESEDVVREVLRRNEEVLRRLREIVKEILDELRKRREEREVLKKLVDDLARVVKEAKRITDELVEEVERVVRESKRRLEELVKEDRRVVTEVKEILKRDVEDEKRVREVLRDLERLHEESKRTVERSVERNKTILKEVRKHAETSKRELERILEDVKRATK

SEQ ID NO: 11583 - protein, 186 aa, Artificial Sequence; identical to SEQ ID NO: 11582
  Synthetic

SEQ ID NO: 11584 - protein, 186 aa, Artificial Sequence
  Synthetic
SEIDKVKKDLEKITRDVERAIKKSDDDSRKNSKEVLETNERVLEELRRIVKEVLDEIRRVRKDKEVLKRLVEEVERVAREVEEITRRLVRHNEESVRTSERILRELVKRDRDVVKEVSEIIERDVEDRDRARDVDKKIKDLHKKSEDEVRKSVKRNRDLLEESKRHAEESREDIRRLLDEVREEAK

SEQ ID NO: 11585 - protein, 186 aa, Artificial Sequence; identical to SEQ ID NO: 11584
  Synthetic

SEQ ID NO: 11586 - protein, 186 aa, Artificial Sequence
  Synthetic
SSAETVLTELRKIVRDILEKSKKSNDDLRKIVEEILKDNEDVLRELREILRRIKEKIDERREDKEELDRLVKEAEDVVREVRKRTRELVEELRRVIREVEEINRDLVRKIDKVVKEVEEILKREVEDKEKVDRIRDDIRRLLKKLRDDVERSVRDVRRILKEVKEHAERSEEEVKRLLKELRDRAK

SEQ ID NO: 11587 - protein, 186 aa, Artificial Sequence; identical to SEQ ID NO: 11586
  Synthetic

SEQ ID NO: 11588 - protein, 186 aa, Artificial Sequence
  Synthetic
DEMDKVLKDAEDVTRRVKEELRKVDEESRRVVKRILDENRRVLKELEDRVRDLRRLIREIREDKDALAELVKEVEKVVRRVDEITKKLLDDVAEVVKRSKERLEKLVEDDRRVVETVKRILDRDVSSEEDVRKIKEDLERLHRESKRDVERSARDNERILEEVKRHADESRREVKRLLDEAKEEVD

SEQ ID NO: 11589 - protein, 186 aa, Artificial Sequence; identical to SEQ ID NO: 11588
  Synthetic

SEQ ID NO: 11590 - protein, 182 aa, Artificial Sequence
  Synthetic
DDLERVLRELERLVDEIRKEIEKVDRESEELDRRVKETIKELDERSKRLVEEVEDMIRRNRDSKELLERLIRLIRKSVEDVKRTLEKLIEDSERSVKEVKDRLEKLIEDLRKVVEDLKKLADERKAPEEVVRRVEKIVRELRKTVEDSIRRNEKSVEETRREAEKSEKRNRELVKRLEEKAK

SEQ ID NO: 11591 - protein, 182 aa, Artificial Sequence; identical to SEQ ID NO: 11590
  Synthetic

SEQ ID NO: 11592 - protein, 182 aa, Artificial Sequence
  Synthetic
SEAEKVLKELEDLVRRIEEDIRRTNEEVRKLDEDVLEDIKRVDEESKKLVREIEERIRSRRDKKDELKKLLERLRRSVEEVRRRLRELIELSREVVKRNEDRLKKLIDDLRRRVKELEKVIDERKFPEEFVRRLEELVKRLADKVKESVDTSRTSVKRTEDEARKSVRRNEDLVRRLEEDAK

SEQ ID NO: 11593 - protein, 182 aa, Artificial Sequence; identical to SEQ ID NO: 11592
  Synthetic

SEQ ID NO: 11594 - protein, 182 aa, Artificial Sequence
  Synthetic
SELEKVLEELERLVKRIEEEIKRTNKEVRDLDEEIRKAIERSNRETERLAREVLERIREERDSKELAKKLIEDVRRVVEESKKELKRLIEESRRVVEKNERDLRRLIEELRRVVKELEELADRKKAPEEVVRRLEDLVRRLEESVERSVRTSRKSVKETEDRIREVERHDERLVEELERAAK

SEQ ID NO: 11595 - protein, 182 aa, Artificial Sequence; identical to SEQ ID NO: 11594
  Synthetic

SEQ ID NO: 11596 - protein, 182 aa, Artificial Sequence
  Synthetic
SDLEDVLRKVEDLDRKIAEDIRRTNEDVKRLDEEIEEKIRRSNEKLRELVRRVLKAIRDRRDDKDLIKKLIEELEEALRRNEELLRKLIEESRDVVRKNEKVLKDLEDESRTVVDELRELADRKKAPEEVVRRLEESVRRTKERIDRSLKTSRDSVRETERKIKESKDTSEKLVKDLRDAAK

SEQ ID NO: 11597 - protein, 182 aa, Artificial Sequence; identical to SEQ ID NO: 11596
  Synthetic

SEQ ID NO: 11598 - protein, 178 aa, Artificial Sequence
  Synthetic
SEVDDILRRLREIDEKLLRENEESLKRLKDEVDRLKRKNEKSLDDLRKLVEKLIDDLRKRKEVEELARRVDDEARRVLKRNKEVVERIREELERVLRRNKEVVETIRKLSEDVVDELRSGGVDEKVLEEVKRSVDRTRDHLRKSEEDVRRLLDELRRHLEDSERRVRELLRKLREKVR

SEQ ID NO: 11599 - protein, 178 aa, Artificial Sequence; identical to SEQ ID NO: 11598
  Synthetic

SEQ ID NO: 11600 - protein, 178 aa, Artificial Sequence
  Synthetic
SKVDEILRELKRLVDELLRRIEKTLKELEDLVRELLKENTRSLEELRELVERLLEELRRRKESEELVRRAIKAVRDVLEKNRDVVRRIKEELRRVLEENREVSREVIELARKVLDELRRGGVDREFVERVRELLKRLEDELRKSNRTIEKLLRDLARHLEDSIRRVEELLRELEEKAT

SEQ ID NO: 11601 - protein, 178 aa, Artificial Sequence; identical to SEQ ID NO: 11600
  Synthetic

SEQ ID NO: 11602 - protein, 178 aa, Artificial Sequence
  Synthetic
KEVEDILRELEKIAKDLRDEIRESDDESRRLVEELLKRSEDTLKELRDLVKKLLDRLRERKESEDLVREIRKRVKEVLDKNREVNDEIIKRVAEALKKTRKVLEKVKELVKRALEKLRRSGVSEEVVKRVEELIRRVEEEVRRSTRRNEKLLEDLRRELERSDRELEKLMDDLRRKLK

SEQ ID NO: 11603 - protein, 178 aa, Artificial Sequence; identical to SEQ ID NO: 11602
  Synthetic

SEQ ID NO: 11604 - protein, 178 aa, Artificial Sequence
  Synthetic
DDVEKILEDLKRIDTELTKRTRDSNKELEDEVRRLMERSRRTLKELEDEVRKLLDRLRKRKESEELAREVERRAEEVLEKNRRVNKEIIKRARDVVEKNTRVNKKIKDDSREVVKRLEDRGVDRKVLEDVRRSLERTERELRESDKSVKKLLDELKEELDRSDREVERLLEELRDAVR

SEQ ID NO: 11605 - protein, 178 aa, Artificial Sequence; identical to SEQ ID NO: 11604
  Synthetic

SEQ ID NO: 11606 - protein, 178 aa, Artificial Sequence
  Synthetic
SEVDEILRKLRELVKELIRRTEESNEKLRKLVEDLRDESRKSLEELRELVERLADELRKRSESEELARRVIRRVEEVVRKNSDVNRRIIEAVKRVVDENTEVNKEIIEEAKRVVEELRRSGVEERVVREVEELLKELKRRLEESDKSVAELLRRLEKDLRESDRRVEELLKRLEDEVK

SEQ ID NO: 11607 - protein, 178 aa, Artificial Sequence; identical to SEQ ID NO: 11606
  Synthetic

SEQ ID NO: 11608 - protein, 178 aa, Artificial Sequence
  Synthetic
SEAEKILTELEEIDRRLVKRTEDSNRKLRDTVRKLEEESKKSLEELRELVDRLLKRLDERKESKELAEEVIRRVEEVVRRNSEVNKRIEDEVKRVVEENTRVNEEIRETSREVVKRLEDSGVDREILERVRESLERTDKRLRESDESVKKLLEDLKRKLEESDRRAERLLEELRKRAT

SEQ ID NO: 11609 - protein, 178 aa, Artificial Sequence; identical to SEQ ID NO: 11608
  Synthetic

SEQ ID NO: 11610 - protein, 181 aa, Artificial Sequence
  Synthetic
SELEEVLKRVEETVRRLTKRLEESLEETRRIVDKLREDLRRSLERTERIVRELTEKLGGTDEARELLKRANEHDKRVVDEIRKRLEEALEKDRRLVDEIRERLKELLEEVKDVVDKIRSKGREEELREVEKKAEKLVRELEERLKRVIEDSERLVTDLKEKLERVLETSKKLLADLEERAR

SEQ ID NO: 11611 - protein, 181 aa, Artificial Sequence; identical to SEQ ID NO: 11610
  Synthetic

SEQ ID NO: 11612 - protein, 181 aa, Artificial Sequence
  Synthetic
KELDEVLEKVKRIVDELERKLERSLRETKRIVDELREELKKSLKETEDIVRELERDLGGTKEADKLLEELLRRDKEVVRRIKEELERMNEHDRRVVEEIKELLERALEEVKDVVRRISKEGRDERLTEVEERAKRLVDTLAEKLKEVERRSEELVKTLEEELRRVLDTSRRLVEELREKAR

SEQ ID NO: 11613 - protein, 181 aa, Artificial Sequence; identical to SEQ ID NO: 11612
  Synthetic

SEQ ID NO: 11614 - protein, 181 aa, Artificial Sequence
  Synthetic
SELEEVLKEVEEIVRRLEEELRKSLKETREIVTKLLKKLKESLEDSERIVRELSRKLGGTDEARKLLEEANDHDRRVIEEIKRELKRLLDKDREVVKKIEDELRKLLKKVREVVERLKDKGRDEEARKVLETAKKLVDDLKRKLERVKEESAKLVDELRKELRRVNERSKELVEKLEREAK

SEQ ID NO: 11615 - protein, 181 aa, Artificial Sequence; identical to SEQ ID NO: 11614
  Synthetic

SEQ ID NO: 11616 - protein, 181 aa, Artificial Sequence
  Synthetic
SELEKVLREVEEEVRRLKKKLKESLDRTKEIVDRLKKDLKRSLDETKKIVDELREKLGGRKEADELLKRANEHDKRVIDKIRELLERALREDERVVREIRKRLKELLERVREVVERLKDEGRDKDLKDVERKAEKLVEDLDRELKEVEKTSRKLVKELEAELREVDKTSKKLVDDLRKDAK

SEQ ID NO: 11617 - protein, 181 aa, Artificial Sequence; identical to SEQ ID NO: 11616
  Synthetic

SEQ ID NO: 11618 - protein, 189 aa, Artificial Sequence
  Synthetic
REVEELLKEVEESTRTSKKIIEDLLRRVKESSDKSKKDIRRLLEEVRRIVDTVRKILERRGKKDKDAEKIIEDVERRVREVLERARRLSEENEKLVREVLRRLEESTRRDEKLVREVLKRARDSVREEELEKRVREVEETLKRLVDENRETLERVARKAKRLVEDDKRDLEEVVRELEELLKRLKEELD

SEQ ID NO: 11619 - protein, 189 aa, Artificial Sequence; identical to SEQ ID NO: 11618
  Synthetic

SEQ ID NO: 11620 - protein, 189 aa, Artificial Sequence
  Synthetic
SSVDRLLERVKRTTDESKERVERLLERVKESSERSEREIKRLLEEVERIVREVKKEVERRGKDAEDVRRIIKEVEDRVKRVLEDVRRSTDEDRKLLDRVREEVRKISEDNAREVEEVLDEVRKQSREEEVEKRVREVERTVEELVKEDREAVKRVEETIRRLLKKNEDTVKKVEDDLRKLLEDLKRDVK

SEQ ID NO: 11621 - protein, 189 aa, Artificial Sequence; identical to SEQ ID NO: 11620
  Synthetic

SEQ ID NO: 11622 - protein, 188 aa, Artificial Sequence
  Synthetic
SEIEELLRRVKKVNDESRERIKELDKRSREVNERSRRKNEELLKRVEEVVREVEERIDRTRDKETVRRLIEELEEIMREAVRRSRKSSEELRKRVEESVKELKRSSDELRRIVKEVIEEAKRNSREKELEDRVRDAVRRLERSLKENEDRVRESIERNKDSVRRNEEHVDESIKRLEKEVDRVRKRAE

SEQ ID NO: 11623 - protein, 188 aa, Artificial Sequence; identical to SEQ ID NO: 11622
  Synthetic

SEQ ID NO: 11624 - protein, 188 aa, Artificial Sequence
  Synthetic
SEIEKLLEDVRKVAEEVKRAIDRLNEENKRVNEKSKERIDRLLEEVRKVVEEVLRRVKTSKDKKTLDELLKELRKDVKRVVDEARKSSEELEKISREVNETLKELLERLRRIVEEVIKEAERRTREEEVEKRVRRVVEKLREIVKEVEEKVRRALDENRRSLEENRRRVKRVIEELEKILKEVEDEVR

SEQ ID NO: 11625 - protein, 188 aa, Artificial Sequence; identical to SEQ ID NO: 11624
  Synthetic

SEQ ID NO: 11626 - protein, 181 aa, Artificial Sequence
  Synthetic
DEVEEMEKELKKLLDDSKRRSDELIEEMRKLNEESKKRSRELEKRLRDINKEIRDRLDRDKAREVLRKSERVTEESRRLAEESDKKSEDVTRRSADRLRRVNKKVADVVERIKELLDEKRDDSKLLDDLRKTIEKVIRESRELLEELRKENERVIEESEKLLRDLLRENEKVAEEVRRTAT

SEQ ID NO: 11627 - protein, 181 aa, Artificial Sequence; identical to SEQ ID NO: 11626
  Synthetic

SEQ ID NO: 11628 - protein, 181 aa, Artificial Sequence
  Synthetic
SEVEELIRRLEKLLREVEKRARRLIEEAKRLNDESNKESRRLIEELERLVEDVAREARRDKVKELLRKLREVVKRIVEALERSDRKSKEVTERSVRLVEKAVRDLERVIREIVKRADEARDDEKLLRDLERAIRDVVRKLEELLRRLREENERVIKESEELLERVRKEIEDVLREAREAAR

SEQ ID NO: 11629 - protein, 181 aa, Artificial Sequence; identical to SEQ ID NO: 11628
  Synthetic

SEQ ID NO: 11630 - protein, 181 aa, Artificial Sequence
  Synthetic
SKVEKLITELEKLLKDSNKKTEDVERELERLNKKSNDDSRRIIEEHKKIVEEIARRVTKDKARDALREARRNVEENRELVERSDKKSKDVTEKSRKAAKESDDRLEEVIREIKRRLDEFRDDEELLKRLKDRIKKVVEESEKLLRDLVKENREVIKESEEILRRLAENLKRVKEEVDRRTT

SEQ ID NO: 11631 - protein, 181 aa, Artificial Sequence; identical to SEQ ID NO: 11630
  Synthetic

SEQ ID NO: 11632 - protein, 181 aa, Artificial Sequence
  Synthetic
EEVERLIKELDDLLRRSNARTRDLIRKADEELRRSNEESRRIVERMEEINKRIADEVQRDKAKDVLEKSKEVTKKSKRLVEESDRKVEEVIREIRKRAKESDEKVKRVIEEIRERLDRKRDDKKLLDDLKRKIETVIKESEDILRKLEEDLKRVIEESKELLDRLLEENKRVMEEARRRTK

SEQ ID NO: 11633 - protein, 181 aa, Artificial Sequence; identical to SEQ ID NO: 11632
  Synthetic

SEQ ID NO: 11634 - protein, 177 aa, Artificial Sequence
  Synthetic
DEVEEIKKEAKRIVEDLKRRNEELKRRLERLVEEVKKRNEESKKRLEDIVRKIKEDIKDGRSEVVKEVEEIIDRLVKESEKSLRDLEKTVEDLVRDSRRSLEDARRIVDELLKILDRGDKDLKEVRKTLEKARKENEDVIRKIEEDAKEVLRRDEESNRDINRKVDEVRKRVEERRK

SEQ ID NO: 11635 - protein, 177 aa, Artificial Sequence; identical to SEQ ID NO: 11634
  Synthetic

SEQ ID NO: 11636 - protein, 177 aa, Artificial Sequence
  Synthetic
REVEEVKKDLERIVEEVKKRNEELKRRLEELLKENKRRNEKSDEDLKRIVDRIDERVREGRKEVVDEATRIVEKLRKDSEKSLRDAKRRIDELMRRSDESLKRLEDIIRRLLEILDRGDKDLKDVKRVVEKVRRENEKVLREILTDAEKVSRDDETSNRDLNRKLEEARERVERKAK

SEQ ID NO: 11637 - protein, 177 aa, Artificial Sequence; identical to SEQ ID NO: 11636
  Synthetic

SEQ ID NO: 11638 - protein, 177 aa, Artificial Sequence
  Synthetic
SEVEEIKERLKRLVEEVERRNRKVIRESEETVKENEKENRKSKKRLKEILDEIVERIKDGRSEVVEELERIIRELARRSEKSLRDVERISRKLVKESRDSLRELKRRIEELLEILDRGDKDLKDVKRDVERVLKENKEVLDRLRKEDEEVSRRDKKSNEDINRVVEDVKRKLEEKAK

SEQ ID NO: 11639 - protein, 177 aa, Artificial Sequence; identical to SEQ ID NO: 11638
  Synthetic

SEQ ID NO: 11640 - protein, 177 aa, Artificial Sequence
  Synthetic
SEVEKVKEDLKKLVKEVEDRNRESKRRSEETVKENTKKNEDSKRRLKEIVDRIREEVKEGRDEVVKKAERIVEDLARRSEESLRRMEKISKDLVRESKRSLDELKRIIEELMEILDRGDKDLKDVRREVKRVLDEDKDTNDKLNDRDRKASEEDERSNRELNKTIARAEEEVKEARR

SEQ ID NO: 11641 - protein, 177 aa, Artificial Sequence; identical to SEQ ID NO: 11640
  Synthetic

SEQ ID NO: 11642 - protein, 177 aa, Artificial Sequence
  Synthetic
KEVEDVKEKLKELVERNRDENRKTKEELRRLVEKNRKENEESKKRLKEIVEEIRERVKEGRSEAVERVRKTIEDIMEDLDRSLRRVEDIVTKLAKESDDSLRRVEEIIRELLKILDRGDKDLREVEKTAEKVSKEDKETNDRIRKDLKKVSDEDKRSNEEVNKRVDKVRKEIEEERK

SEQ ID NO: 11643 - protein, 177 aa, Artificial Sequence; identical to SEQ ID NO: 11642
  Synthetic

SEQ ID NO: 11644 - protein, 170 aa, Artificial Sequence
  Synthetic
EESERLDELIKEVVERVKKLNEEARELIKDVLRRNEEVNTRLEELNRKVEKEVREEKDKDRLVRRAEAVSKTTEDLVRETIEEAKEVVKEVRDLVRRSNEDLRRVVEEVRERGVDRKVLEKIRRALEKVHEDNRRSIRDVERMLEKVEDDNRKTIERSRRLVKRVEEELR

SEQ ID NO: 11645 - protein, 170 aa, Artificial Sequence; identical to SEQ ID NO: 11644
  Synthetic

SEQ ID NO: 11646 - protein, 185 aa, Artificial Sequence
  Synthetic
RSLEELKKEVERVARAVRKVSEDNKRLLDRVREEVKRVSKENRDLVREVERRVEEVKRRVEDRKELKERVTKLLKELEDSSREVIKRVEELIDRMRRSSKEVEDRVRELLRELERVVRDVKRKVKDLERVDRLKEEIEEILRDLERKVRENKERSKKIAEDLRKHAEDNAREVKKALRDLEEKVR

SEQ ID NO: 11647 - protein, 185 aa, Artificial Sequence; identical to SEQ ID NO: 11646
  Synthetic

SEQ ID NO: 11648 - protein, 182 aa, Artificial Sequence
  Synthetic
SELERVLREIREVSRETRERSERSLEEIRRVVEDVRRKNKESLDRNREVLEEIRKALEKGPEELMRELLKEIKESSRESNRTSDESVEEVRDVARKVERRNEELLERSRRVAKRVEEEARRAPEDRVERVKRELERLVEENERIVRESRKTLEKLVRDVDRTSKRVKDENRKLLRRVEEEAR

SEQ ID NO: 11649 - protein, 182 aa, Artificial Sequence; identical to SEQ ID NO: 11648
  Synthetic

SEQ ID NO: 11650 - protein, 182 aa, Artificial Sequence
  Synthetic
SEVEDLLRRIRKVVEEVERRSRDSLRRNEEVVKEVEERSEKSLRDDKKVIDDVKRRLREGPEEEVRRLLDEVRKSSEDVVEENRRLLKRVEESSREVVKINDRLLEEVRRVVREVLEELRRAPKDEVRKAEEELRKLVRKAEEVVKKSKEDLERTTRKVEKVVRKSEEDSRRLLREVAEEAR

SEQ ID NO: 11651 - protein, 182 aa, Artificial Sequence; identical to SEQ ID NO: 11650
  Synthetic

SEQ ID NO: 11652 - protein, 182 aa, Artificial Sequence
  Synthetic
SKLDKILEELRRIVEEVKRRSEESLEEIERVVEEVKRRSRRSNEELKRIVDKIKKDLRDGPKELIRELLKEIERVAREVKKINRDLLEDVKRVVDKVRRENEKLLEDVRRVVEDVKRRISEVQEDDVDRVRREADKIVEDVRRVVERSKRRLDELRRDAEKVVRDSERRIDRIVDDVRRTAK

SEQ ID NO: 11653 - protein, 182 aa, Artificial Sequence; identical to SEQ ID NO: 11652
  Synthetic

SEQ ID NO: 11654 - protein, 182 aa, Artificial Sequence
  Synthetic
SDLEEVLKKLEDILRKIKETNDKALREIEEVLRRVKERSRRSNKEAEKVLREVEKMLEKGPKELARKLLEEVERVVRKVTEDNDRLLKEVEDVVRRVEELSRESLKTIEKVVRDVARDVERVEEDEVRRIKERLERLLRTAERVSREIKKRLEELVDDVRREVKRSKDRLKRLVDEVAERVR

SEQ ID NO: 11655 - protein, 182 aa, Artificial Sequence; identical to SEQ ID NO: 11654
  Synthetic

SEQ ID NO: 11656 - protein, 182 aa, Artificial Sequence
  Synthetic
SKVDEILKDIERVVREVEKKSRKSNEELKRISEESKRRNEDALRRLKEIADRVRERLDKGDKEEVRELLKTVRDVVKKVKEESDRSVKRSEEVAEEVKRRNEALLKEVEDVARDVEEKLREAPEDKVRDARRRLKELVDRVKRVVEESEKRIRKLVKENRDVSRRIEEELKRIVREIEEEAK

SEQ ID NO: 11657 - protein, 182 aa, Artificial Sequence; identical to SEQ ID NO: 11656
  Synthetic

SEQ ID NO: 11658 - protein, 182 aa, Artificial Sequence
  Synthetic
SKLEEILKKVEKVSEDTKRKSEDSNRRIKKVSDESKELNKKALRDITEMAKEVDRVLKEGREDEVKKLLDEVREVVERVRKISEDSVRRSEEVVRRVEEINRELLKDSKRVVDEAAERIREAPEDRVDEARRRLERLVEDNARVVKRSEDELRKLVEDNRRVSEEIERKLKELLKRVAESVT

SEQ ID NO: 11659 - protein, 182 aa, Artificial Sequence; identical to SEQ ID NO: 11658
  Synthetic

SEQ ID NO: 11660 - protein, 182 aa, Artificial Sequence
  Synthetic
SKAEEALKELERVADEARRASEKSNREAKKAADDAKRASEKSLREAERAAREAEKALREGPEEDARRLLKEVEEVARRAAKINKELADRVRKVAEDAARINDKLLEEVRDAARRAKEAAREAPKDDAKRIKDEADKIVKRAEDAARESKKRLKRLVEDAERAAKESKEELDRLVREAEEKAR

SEQ ID NO: 11661 - protein, 182 aa, Artificial Sequence; identical to SEQ ID NO: 11660
  Synthetic

SEQ ID NO: 11662 - protein, 178 aa, Artificial Sequence
  Synthetic
SEVERVLKELEDLIRKLEEEIERSLRELEKLIEELKKEIKESLDELEKLIRDLIRRLDERKESEELAREVRELVRRVLEKDREVLERVIREVRKALEKNKRVLDRVRKLVEEVLEKLRRGDVSEEADKRAKELLDKLRKVIEKSKEDSRKILKDLERTVKRSEEESRKVLEKLERRVQ

SEQ ID NO: 11663 - protein, 178 aa, Artificial Sequence; identical to SEQ ID NO: 11662
  Synthetic

SEQ ID NO: 11664 - protein, 178 aa, Artificial Sequence
  Synthetic
DEVERVLRELRELIKRLEEEIRKSLKELEDLIRRLIEEIEETLKKVEKIIRELKARLEERKESEELARKVEEDVRRALKENKRVLEEVIRRVRKVLEDDRRVLEEVIRRVEKMLEDLKKAGVSDELREEAKKLLRRLEKTVEKSKRDSEKVLRDLEEVVRESERASKELLKDLKRKVD

SEQ ID NO: 11665 - protein, 178 aa, Artificial Sequence; identical to SEQ ID NO: 11664
  Synthetic

SEQ ID NO: 11666 - protein, 189 aa, Artificial Sequence
  Synthetic
SELERLLREVEKSSRESVETSRKLNEEVEKTTRESKRRIEELLRRVEKIVDEVKKVIDRDGKDSEEVRRIVEEVKKFIETILEEIKRSSEEDERRIRDVLRKSEKSSEDDRRLLDEVLKEVARRTRTDEARERLRRVAEEIKRLAKENKRVAEESKRRAKELLDDNKDTVRRVSERLKELLEDLDRKLK

SEQ ID NO: 11667 - protein, 189 aa, Artificial Sequence; identical to SEQ ID NO: 11666
  Synthetic

SEQ ID NO: 11668 - protein, 189 aa, Artificial Sequence
  Synthetic
DEIEDLLRRVRKTTEESKKRSEDLNKEVKDSTREVKKRIKELLEEVERRVKEVKERMERDGLKSEEVKRIVDEVERELERVVDTVRKIVEDDKRLIEDVVRRSKDLSRRDVELIKTILKEIEDRSRTEEAEKRVRRAKEEAERLIRDNERKLKESEEELRRLIKETEDVLRKAEEDIRRILADLRRRLK

SEQ ID NO: 11669 - protein, 189 aa, Artificial Sequence; identical to SEQ ID NO: 11668
  Synthetic

SEQ ID NO: 11670 - protein, 189 aa, Artificial Sequence
  Synthetic
SEVEKLLEDVRESTKRVKELSKRLNEEVERTTKESEDRTRRLLEEVKRIVEDVKDKLRKRGKDSEDARRIVEEVKKRIREIVETSTRLSEDDKRLIEEVLKESERIVREDEELLRRVLEEVERRSRTEEAKKRVKEISDEIRKLAEETREVLERSEKRLRELIRRNEKVNKEVAERLEEILRDLDRKLR

SEQ ID NO: 11671 - protein, 189 aa, Artificial Sequence; identical to SEQ ID NO: 11670
  Synthetic

SEQ ID NO: 11672 - protein, 174 aa, Artificial Sequence
  Synthetic
REKEDAKRRLEEILREVKKDLDRVHRENEKLVEDTARTVERIKRELKKLLDRAREVPVEEELIKEIEKIVEDIVRRVEELLRRDKKVSDDVSREVRRLVEDLRRIVETVVELVKAGMDIEELRKRVEDVVRRVKEELERLLKENEDSTREVKKEAERLLDEIRKVLEKVERDAK

SEQ ID NO: 11673 - protein, 174 aa, Artificial Sequence; identical to SEQ ID NO: 11672
  Synthetic

SEQ ID NO: 11674 - protein, 174 aa, Artificial Sequence
  Synthetic
REKEEAEDRMRRILEEVRRTLEEVHKENRRLLEDTRRTVERIERENRKIVEEVRRVPVDEKLVKKAEDISRRVTEEVRRLLDEDRRVSEEVSRRAEELVRRLEEIVRRLLELVREGMDIETLERRVREVVERVKKELERLLRENKKSTEEVKRTAEDLLRKNREVVEEVKKAAK

SEQ ID NO: 11675 - protein, 174 aa, Artificial Sequence; identical to SEQ ID NO: 11674
  Synthetic

SEQ ID NO: 11676 - protein, 184 aa, Artificial Sequence
  Synthetic
DEVEELERRLEELLKKSRDEVTKLADELDRVLERSREVVKKDRESLKEILKEVERLVREKNDERLKEAVDELRKVVEEIERRNEKAVRENEEVVRDVKRRVKEVVEENERVVRKIKDVLRDKDKSKELLDRLEKELRESVKRSEERLKELADRIRKSLEDSERLSRRTNERIKRVLEEVTERVK

SEQ ID NO: 11677 - protein, 184 aa, Artificial Sequence; identical to SEQ ID NO: 11676
  Synthetic

SEQ ID NO: 11678 - protein, 184 aa, Artificial Sequence
  Synthetic
DEVEDVSRKLDEALERSRRITEDLEKKLREVIETSKREVDKLAERLDEVIREIEERIRKKNRKELEELLREAREVVKEVKKRLEDLLRRNEKVVREIRETVERLNEELREVAKRVRDVARKEDKNKELIEKLEEDIRRVLEKIKREHERLLRKIEESLKDSKRRLDKLRRDIERILERIREALR

SEQ ID NO: 11679 - protein, 184 aa, Artificial Sequence; identical to SEQ ID NO: 11678
  Synthetic

SEQ ID NO: 11680 - protein, 178 aa, Artificial Sequence
  Synthetic
REIEEALRELEEVLRKVKEDNKRLEEEIRRVLEEVKRINEKLLRDAKKELDRVKEILKDTRDEKAVREVLKEVEDVVRRVKRMSEESVKEVERVVRELVERSRRSLEEVRRVVRRLLERVKDVEEAKKELRRLVKEVEDVVRTSTRRLEELVKEVRRVSEETKRALDELVKEVREEVR

SEQ ID NO: 11681 - protein, 178 aa, Artificial Sequence; identical to SEQ ID NO: 11680
  Synthetic

SEQ ID NO: 11682 - protein, 178 aa, Artificial Sequence
  Synthetic
DEIEDVERKIKEVVDRVRDINRRLRDTIRRVLEKVTRINEELRDTVRKVLKEVERILREIKEESKVEEVLKRVREVIEKLARDSRDSLREVERVARELKERSKKSVEDVKKVADDLVREIRESEEIKEKLERLVREVKRISEESAKDLERLVREVEKVVEDSERELRRLVEEVERRRK

SEQ ID NO: 11683 - protein, 178 aa, Artificial Sequence; identical to SEQ ID NO: 11682
  Synthetic

SEQ ID NO: 11684 - protein, 178 aa, Artificial Sequence
  Synthetic
SEIEKVRKEIDEVLKRVRKINEDLLRELEEVSKRSKDINDDDLRTNTEVLKEARRILKDSTDERLVEEALKRVEEVTERNVRSSRKSLEESERVVRRLLEASRKSLEEVRKVAKEIKEKIKDSKDVTKELDELVREVEEEVRRSKDTLRRIVEENREVVERSERKLKKSSDDVREERR

SEQ ID NO: 11685 - protein, 178 aa, Artificial Sequence; identical to SEQ ID NO: 11684
  Synthetic

SEQ ID NO: 11686 - protein, 189 aa, Artificial Sequence
  Synthetic
SELEKVLRELEENSRRNEEELRRSNDKVRRVLDEIRRKLEEVLRKVEEVLRRIEEELSDKKDDRVAKEVIKRVEDVLRDLDRILKEVIKKVETVLREDERIVEELLDNIRKVLDRLRDILEEVKRRREDVKDKVKKAEDDVRRLLERNRRLVEESKKSSEEFLRRVEKLVDDARKKVEDALRKVRETAR

SEQ ID NO: 11687 - protein, 189 aa, Artificial Sequence; identical to SEQ ID NO: 11686
  Synthetic

SEQ ID NO: 11688 - protein, 189 aa, Artificial Sequence
  Synthetic
SELEKVLRDLEKNSRENEELLRRSNKKLKDVVDKIKKKLERALEELREVLEKIRRELSRSTDRKVAKEVIERVERVLRKLEEILRRVIREIEEVLREDREILERVIRNIEKVLEELKEIVREVRRRREDMDDKVRKAEEDVKRILDENRDLVRRSEENSKRLLERVRELVERVKDAADKLLREVREEAR

SEQ ID NO: 11689 - protein, 189 aa, Artificial Sequence; identical to SEQ ID NO: 11688
  Synthetic

SEQ ID NO: 11690 - protein, 189 aa, Artificial Sequence
  Synthetic
SELETVLRELEENSRRNEELLRRSLDRVRRVLEDVTKKLREVLEEVRTVLEDVKRKLSRVTDKKEADKLIERIERVLKKLEDILRELIRKAERALEEDKRILDDVIRNIEEVLKKLDKILEEVKRRSDDVRDKVKEAKDRVRKILEDNRRLVEKSEEDSKRILETLRKLVEEMKRELERIETELREAAR

SEQ ID NO: 11691 - protein, 189 aa, Artificial Sequence; identical to SEQ ID NO: 11690
  Synthetic

SEQ ID NO: 11692 - protein, 189 aa, Artificial Sequence
  Synthetic
SELETVLRKLEENSRRNKKLLRDVLEEDKTVLRDVERKLREVLDELRKVLEDIRDKLSRKTDDRVAKEVERRVREVLKKLKKILEDLIRKMEDSLRKLKEILKRLIENAERVLRELEKILKDVKDRREDVKDKAETMKKAVEEILDRNRKLVTEAEKRSEDSLRKLRKSVKEVEEKVKRVLEEVKKEAD

SEQ ID NO: 11693 - protein, 189 aa, Artificial Sequence; identical to SEQ ID NO: 11692
  Synthetic

SEQ ID NO: 11694 - protein, 189 aa, Artificial Sequence
  Synthetic
DELERLLEELERNSRENKKRLDESRKRVKEVLDRIEKKLRDVLREVEDVLRKIREKLERKRDDRVAKEVKRLIEDVARKLEKILKEVTDAVKKVLDENKKILEDLIRNIEEVLKKIERILEEVKRRAEDVKDKVKELRDRVKELLDRNREEVRKSEEDSKRVLDEVKRLVDELRERLREIRKRVEEEAK

SEQ ID NO: 11695 - protein, 189 aa, Artificial Sequence; identical to SEQ ID NO: 11694
  Synthetic

SEQ ID NO: 11696 - protein, 189 aa, Artificial Sequence
  Synthetic
SELEDVRRELEENSRRNEETLRRSLAELEENSERNRRELERVLAEVEKVLKKATETLSRVDDKEVARRLEDEARKVLEDLERILRRLIENIRRVLEKNKKIAEDLIRNLERVLEKLKEILRDVDRRRKDVRKEVKKVEDDVRRILEENRRLVEESERRSRRILEENEELVEDIKRKLREIEKELRERVR

SEQ ID NO: 11697 - protein, 189 aa, Artificial Sequence; identical to SEQ ID NO: 11696
  Synthetic

SEQ ID NO: 11698 - protein, 183 aa, Artificial Sequence
  Synthetic
SEVEELEREIRELVERNRELVRRLEEEARRLSRRNEELVRELKERAERLVKELKERLDRVDREELKKIADRVRREAERLVEDVRRSSRKVSEENKELVKEVRKSSTEVIKRLEDLVEKVRRDNDKDTLDEVRKEVRKLSKENEERLREVLEESRRLSKRNEEILKEIAERVKRLVDKLTDDIR

SEQ ID NO: 11699 - protein, 183 aa, Artificial Sequence; identical to SEQ ID NO: 11698
  Synthetic

SEQ ID NO: 11700 - protein, 175 aa, Artificial Sequence
  Synthetic
SEVEDVERRVRKLLEENDRLLEENEKSARELMKRDKKVSDENEKSVRDLLDRLRKEIRDEDVVRKVEEILKDLLRKDREVSKENIKILKELLDRSRDSSRRVRETLKRLLDKARKDKDVLEELLKKLRKLSEDNERLLRESNERAKRSTDESERLSRETNERVKDVVTRLKEASK

SEQ ID NO: 11701 - protein, 175 aa, Artificial Sequence; identical to SEQ ID NO: 11700
  Synthetic

SEQ ID NO: 11702 - protein, 175 aa, Artificial Sequence
  Synthetic
DEVDEARKEVDKLAKENTELVKRNKDSVKELVREDEDELRKNRESVDELLRRLEEEIRDERVVEDVIRKLEKLLEDSTRASEENKKRLEDLLRESEKSSRDVKKLLDDLLKKLKDVEGVLEEVLKTLREVSDRNKKLLEESNERVRKSTKESKDKLRKSNEEVKRVLKELRDTDT

SEQ ID NO: 11703 - protein, 175 aa, Artificial Sequence; identical to SEQ ID NO: 11702
  Synthetic

SEQ ID NO: 11704 - protein, 180 aa, Artificial Sequence
  Synthetic
DELDRLLEEVKRSLEDVEEKLKKLEEEVKRVNDELRKRLTRLLREVERSLKRVEDLIRNGEPKEDILREHERSVKEVLKEVRKVVTEVEEAHKRVMREVERVLREHEETVKRVLEDVTRRNGEKLEEVRERLKESLDRLRKRVEDLKRRLRESLESVRKLVEDLERALRKSLEELRERVR

SEQ ID NO: 11705 - protein, 180 aa, Artificial Sequence; identical to SEQ ID NO: 11704
  Synthetic

SEQ ID NO: 11706 - protein, 180 aa, Artificial Sequence
  Synthetic
EELDRLLKRVEESLRRVERILKELLDRVRKVNEDVKRTLDDLLRRSKESLDRVRKLREEGKDKDTVLKEHEKSLRKSTEDAKKVIREVEKVHKEVLDRVRKVLREHEKTVREVLEAVRRRNGEKLEEVEERLKRSLRELERLVRELEEELKKSVKSVRDLLEELKRRNEDSLRRLAEEIK

SEQ ID NO: 11707 - protein, 180 aa, Artificial Sequence; identical to SEQ ID NO: 11706
  Synthetic

SEQ ID NO: 11708 - protein, 180 aa, Artificial Sequence
  Synthetic
KELDDLLREVERSLDRVRKRLEDLLREVERVNEEVKKRLRDLLEELKRVADELRKLREDGKPKEKVLEELERAVKRLIDEVRRVIKEIEKFHKDVLDDVRRVLREHEETVKEVEERVRRRNGEKLEDLERELKRSLKELRDEVRELEERLRRSVESVRRVLKELEERARRLLKEVRDEIK

SEQ ID NO: 11709 - protein, 180 aa, Artificial Sequence; identical to SEQ ID NO: 11708
  Synthetic

SEQ ID NO: 11710 - protein, 180 aa, Artificial Sequence
  Synthetic
SELDKLLEDVKRSLDEVKRLLKELLDRVKKVNKELEEVLKRLEEDSRRVVEEVEKATRDGKDKDTVLKKLEDALRRSTEEVRRVLREVEEVHERVRKEVRRVIEEHRKTVKDVLDKARKRNGEKLEDLERKLEDSLRRLEELLRRLEDELRKSLTSVRKRVKELEEKNRELLKRVEEKIR

SEQ ID NO: 11711 - protein, 180 aa, Artificial Sequence; identical to SEQ ID NO: 11710
  Synthetic

SEQ ID NO: 11712 - protein, 180 aa, Artificial Sequence
  Synthetic
KELDELLKRIEDVVRRLEEELKRLLDEARKVNEDLERRLRKLREDVERSLREVDKMIRNGKPKEEVARRHEESVKEVDKDVKKVLKEVADRHREIVKRVEEVLRRAERVVEEIKREVRRRNGEKLKDLEKALEELLDRVRRLVKELRDRLRDSLRSVEEEVKKLKDELDRSRKAVRDKVK

SEQ ID NO: 11713 - protein, 180 aa, Artificial Sequence; identical to SEQ ID NO: 11712
  Synthetic

SEQ ID NO: 11714 - protein, 180 aa, Artificial Sequence
  Synthetic
SELDRLLERVRKSSTDSEKTLKELRDEIRRVNDEVRKVLEELLKESRRVAEEVKKVIDNGEPKEELLKTLEEVIKKSTKDVRDVIRELRRIHEEVLDRVRKSSRKNEESVRKIEEDARRRNGEKLEDLERELRRLLRRDRELVKKLEEDLRRSLKSVEEEARRLERANRELLREVEEKAK

SEQ ID NO: 11715 - protein, 180 aa, Artificial Sequence; identical to SEQ ID NO: 11714
  Synthetic

SEQ ID NO: 11716 - protein, 180 aa, Artificial Sequence
  Synthetic
SELDKLLRDVEESSRRSEETLRKLEKEVRDSSTESERILRELRDRIKKVADDVEKVIRDGKPKEKLVEDAKEFVREVEERVRKSSEDNRKTVEDIERRVRESSERNKDSVRRVLEEARKRNGEKLEELEKRLEDLLRRDKKLVDDLRKKLRDLEKRDRDLVEELRRELEELLKRVEDAAR

SEQ ID NO: 11717 - protein, 180 aa, Artificial Sequence; identical to SEQ ID NO: 11716
  Synthetic

SEQ ID NO: 11718 - protein, 180 aa, Artificial Sequence
  Synthetic
SELDRLLREVEKSSKRSEETLRDLRREVEDSSRRSEEILRRLLEESEKVAREVRKLIEDGQPKEEILKELARVIEESTRRAERSSRENEDTVRRIVKRVEDSSKRNAESVRDVMRKARERNGEKLEELEKRLRELLKRDKELVDELRKRLEELLKRDRELLKRLEEENRRLLEEVERRAR

SEQ ID NO: 11719 - protein, 180 aa, Artificial Sequence; identical to SEQ ID NO: 11718
  Synthetic

SEQ ID NO: 11720 - protein, 180 aa, Artificial Sequence
  Synthetic
KELDELLDEVRRSSETSERILRKLLREAEESTDRSKRTLKELLRELEEVVERVKKMIRDGKPKEKVLKELEDAVRRVLEDVRRSSEENKKSLEEIVRRVRRSSEENERTVRRVVEDARRRNGEKLKDLEKALRDLLDRDRKLVEELEDRLRKLAEEDEKVLRELEEELKRLLEEVAEETR

SEQ ID NO: 11721 - protein, 180 aa, Artificial Sequence; identical to SEQ ID NO: 11720
  Synthetic

SEQ ID NO: 11722 - protein, 188 aa, Artificial Sequence
  Synthetic
SLLEKLERDLERVHKESEDLARELRKELKRVHEESRELMKEIDKELRRVLEEVKSLLRRGDGEVLEELIRRAEEVLRTVERLLRRLIRISEEVLKKVEKDLERLERISREVVREVRRVLEEVKREREDVKDKVRRVEEKVEELLDRNRKLVEEVRREVEKVLRDDRRLVREVERKLKEALDEVRERVR

SEQ ID NO: 11723 - protein, 188 aa, Artificial Sequence; identical to SEQ ID NO: 11722
  Synthetic

SEQ ID NO: 11724 - protein, 180 aa, Artificial Sequence
  Synthetic
SEVEEVERRVDEVLKELKRKVDRSREESERIARELERLVEESEKKVRDVVRELEDLLRKVDREEVKKLVKEIIDELKRSSDRVRELVRRLIKEAEDSSDEVRRRIEDLLERLKELVEKAAREGRGEDLKEKIKEVEDRVDKVIKENKDLLDDVERRVRKVIKENEDLIKELRKRVEEVAR

SEQ ID NO: 11725 - protein, 180 aa, Artificial Sequence; identical to SEQ ID NO: 11724
  Synthetic

SEQ ID NO: 11726 - protein, 180 aa, Artificial Sequence
  Synthetic
SKVEELEKRVRKVMEKLKKLLKDSEKESDDVARRLEELLEESEREVREVLRELEDLLRKVDREEVKDAVRKLLERAKRSSDEVRKRIRDLIEESKRSSEEVKRLIDKLIKELEDVIRKAAKDGRGDDVDETIKRVEEEVKKVVDDNRRLNEEILRKVKKVIDDNRRLIEKVREDVDRMAK

SEQ ID NO: 11727 - protein, 180 aa, Artificial Sequence; identical to SEQ ID NO: 11726
  Synthetic

SEQ ID NO: 11728 - protein, 183 aa, Artificial Sequence
  Synthetic
SVVETVDKRLKRLLEKVEKSTEDSRRTAEESKKRVDRSTERVKEVLDRLRREVERLKDDDRADDIVREVVKRADELVKENEKVIKKVIEDNKKSVKENEEVIREVVKRIREVVEEAKRALKGGKKEKVRTVEKRAEDVIREARKLLEESKRRHDKVVEELERLLKKSKEDVDRVIKELEERRK

SEQ ID NO: 11729 - protein, 183 aa, Artificial Sequence; identical to SEQ ID NO: 11728
  Synthetic

SEQ ID NO: 11730 - protein, 183 aa, Artificial Sequence
  Synthetic
DEVEEVKKRLDELRKEVERSTREVREVLKKLLKEVKDSTDDVRRTIEKLLRDVERLKDEEEAKRIVDDVKRRIRELLDRNREVIKRVVEEARKVVDKNRRSVERVVDEARKLVEELIRRLKGGKKEELKKVEDRVREVIKDLEELLRDSKRTVEKVERELEDLVRKSEEEAERVERELEERAR

SEQ ID NO: 11731 - protein, 183 aa, Artificial Sequence; identical to SEQ ID NO: 11730
  Synthetic

SEQ ID NO: 11732 - protein, 183 aa, Artificial Sequence
  Synthetic
SVVEEVDRLLEELLRKVKKSTDESKETAKESRKEVKRSTEDNDRTVEKLRDEVRRLKDDERVEEVVEELIRRIERSAEENERVIREVIEKNERSMRENKRSVDDVVEKLRTVVDELRKALSKGVDDRVREVETRVKKVIDDVRRLVTESKKDHERVVKELRELVEESKRRNDRVVEEAKETAR

SEQ ID NO: 11733 - protein, 183 aa, Artificial Sequence; identical to SEQ ID NO: 11732
  Synthetic

SEQ ID NO: 11734 - protein, 183 aa, Artificial Sequence
  Synthetic
SMVEEVKKVLEKLKRDVDKSTDEVRDMLRRLLEEVRESSREVERRLRELKEEVDRFKDDERAKEIVKRVVEEAKKLVEENERSVRRVVEEIKKLLTRNKEVIDEVVKRARDLVRKLEEKLRGGKKEEVKKVKKEVDEVIRRLKELVRRSEEEARRVIKTLEKLLRDSKKRVEDVIKDLDRTVR

SEQ ID NO: 11735 - protein, 183 aa, Artificial Sequence; identical to SEQ ID NO: 11734
  Synthetic

SEQ ID NO: 11736 - protein, 183 aa, Artificial Sequence
  Synthetic
SMVEKVEEDLKKLTRDVEKSTEESRKTAEDSARDVRRSSREVEDVLRRLRKEVEELKDDDRAEEIVRRVVKEARDVVEENERSVRKVVERNRRSVEENKRVIDEVVERAKRLVERLREKLDKGKKEEVKKVEDKVKEVIERLKKLLDESKKRHEDVIRELEKLLEESERKVRKIIRELEETLR

SEQ ID NO: 11737 - protein, 183 aa, Artificial Sequence; identical to SEQ ID NO: 11736
  Synthetic

SEQ ID NO: 11738 - protein, 183 aa, Artificial Sequence
  Synthetic
SVVEEVKRRLEELEKRVEDSTRDSKRTLDESERELEESSRDNRRTVEELLDELRRLKDREEARDVARRVVEAIKKSLDDNRRSIDELVKKNEDSVKKNEKVIKEVVDEARKLVEKLVRRLKGGKKEEVEKVEREVREVIKKLRDLVRRSREEHEKVIEKLKRLLEESEDTNRKVIKKVEDDLR

SEQ ID NO: 11739 - protein, 183 aa, Artificial Sequence; identical to SEQ ID NO: 11738
  Synthetic

SEQ ID NO: 11740 - protein, 186 aa, Artificial Sequence
  Synthetic
SVTDEVREKLRRLLEELREVVKRVEDISRKTHEETKRVVEKVKRILEKLKREIEEVIRELGKDDRLRKVVERVEREARRVLKELEEAVKRSMKKNEKALRDLRRVAKKVVDALRKILKEVAERLKDRKEDLERLRRDVERVIREIEKLLRDVEEKVKETIKTDEDLLRRVKEDVERVLEEIDRRLK

SEQ ID NO: 11741 - protein, 186 aa, Artificial Sequence; identical to SEQ ID NO: 11740
  Synthetic

SEQ ID NO: 11742 - protein, 186 aa, Artificial Sequence
  Synthetic
SVAETVKERLKDLHRRTKESNERAKRISDELNKHNEKSVRDVDREVKRLLEEITEVIKRLGKDERLKKVAREIERILEKVLEDVKRNSEKAAREHKKVVEENHRSVRRSAEELKRILEEVARDLKDDKEALRKLDEEVKKVADDDRRLNEESRKRAKDSIEESRKLVRDVAERVKEVARKIREDLR

SEQ ID NO: 11743 - protein, 186 aa, Artificial Sequence; identical to SEQ ID NO: 11742
  Synthetic

SEQ ID NO: 11744 - protein, 179 aa, Artificial Sequence
  Synthetic
DEARELIERVKRVLDRVREENTRVNKELHDILRRVEKRNRDLLRELREILKDVKKKADEVREDKEVLRKLLKEVEKALRRVKEESDRSLKEVRDAVEEVKRISDTSLDKVRKVLEDAKRAVKDSRELEKELRRLIAEVARIVEESRRNLERIEEAIKRISETSEKEIREIEDRIKKDVD

SEQ ID NO: 11745 - protein, 179 aa, Artificial Sequence; identical to SEQ ID NO: 11744
  Synthetic

SEQ ID NO: 11746 - protein, 176 aa, Artificial Sequence
  Synthetic
SEAERAREEAKKLKEEIKKSNDELRKAAEKLKRDIERSNDELRKAIEELKRRVESLLRRVEKKLVDEVRRLAEDAARKLKRSLDETRKLVEKVLREIEESLKTVEELVKRLLEEIEKALESDEVLKEVKRIAEELHRHNREVLERIEKIARELEKHNRDVLDDIRRIVEKLERDLN

SEQ ID NO: 11747 - protein, 176 aa, Artificial Sequence; identical to SEQ ID NO: 11746
  Synthetic

SEQ ID NO: 11748 - protein, 176 aa, Artificial Sequence
  Synthetic
SEEERAREDLERLREEIRRSNEKLEEDSDKLRRDIEESNRRVEEEIRRLKEDVERKLKDVPEDLARKVRELVERLMDKIRKSLETTRELIRRVLEHDKRSLDEVEKIVREALKLIETRLESEEVLEEVRRLVKKLHEHNEESLRRSEEILKDLERHNRDVLREVEEIVREALERLD

SEQ ID NO: 11749 - protein, 176 aa, Artificial Sequence; identical to SEQ ID NO: 11748
  Synthetic

SEQ ID NO: 11750 - protein, 176 aa, Artificial Sequence
  Synthetic
REAEEAKKEADRLEEEVRDSNRKLEEDSKRLEREIRESNRKLKETAERLLRDVERLLKDVEERLVRDVKRKVEEAMEKLKKSLDKTRKLVRELLEHDRKSLEESERLVREVLRLIEEKLESKEVLEDIRRIVKELHDHNKKSMEDSRRIIEELKRHNKRVIDEVKKIVDELREKLR

SEQ ID NO: 11751 - protein, 176 aa, Artificial Sequence; identical to SEQ ID NO: 11750
  Synthetic

SEQ ID NO: 11752 - protein, 176 aa, Artificial Sequence
  Synthetic
REAEEAEKELKRLEDDIKKLVEDLDREAKRLKKEVDDSNRELEKESRRVKKEVRELLKDVDEKLVREVEKLVDEALEHDKKSLDDTRKLVEDVLRKLEEVLKEVKKLVDDALEEIRKKLESDRMLEKVKRIVDELRKLLKTVLDDVRRIVEELHRHNKESMERTRKILEDLARRLT

SEQ ID NO: 11753 - protein, 176 aa, Artificial Sequence; identical to SEQ ID NO: 11752
  Synthetic

SEQ ID NO: 11754 - protein, 176 aa, Artificial Sequence
  Synthetic
SEAERAREVLERLREEVERSNKRVREELKRLTEDVRRSNKKLREDSEEVRKRVEDLLKDVDKELVDEVRKLVKEALDLDEKSLKETEDLVREVLEEIEDSLRKTDELVKRALKIIEDKLESDEMLRRVRRIIEELHRLNKEALDRVRKIIEDLHRKNEDSLKKTEDILRRLEEELR

SEQ ID NO: 11755 - protein, 176 aa, Artificial Sequence; identical to SEQ ID NO: 11754
  Synthetic

SEQ ID NO: 11756 - protein, 179 aa, Artificial Sequence
  Synthetic
SSIEEVLERLRRLSDEVRKRTDDVLERAREISRETEERSRRINEEIERIVEELKKRADKDMVEKVKRDAEELLKKSEDLHRRVIETLRRLVERVREIHEETIRRLEELLKKVEDELKGGDKEAVDRARREVERLVKENEDILKRLEEEVRKLVKRNEDLVEENRREVEKWRKELEDRKR

SEQ ID NO: 11757 - protein, 179 aa, Artificial Sequence; identical to SEQ ID NO: 11756
  Synthetic

SEQ ID NO: 11758 - protein, 179 aa, Artificial Sequence
  Synthetic
SEIDEVLKKLRDDSKKVEEDTRRVLEELERISEKTRKDSEEVLREIEDIVEKLKRRSDEDMVRRVMEEADKLLKELEDRHRDAIRRLEELVKRVEEIHREVIERLERLLKEVEKRLSKGVREEVERAEEEVRKLVEENKRIVKEAKERVDELVERNKEIVEEIRREVERLKKELEDRRR

SEQ ID NO: 11759 - protein, 179 aa, Artificial Sequence; identical to SEQ ID NO: 11758
  Synthetic

SEQ ID NO: 11760 - protein, 179 aa, Artificial Sequence
  Synthetic
REVEEVTKELRKISKEVEDLTREVLREAREISRRTEEESRRLNKEIAEIVERLRREGDEKAVEEVLREVDKLLEESERLHREAIERLRRLLEEVEEIHRRVIEEMKRLLDDLTRKVDKGSKEDVRRVAEEVKRLVDKNRRIVEEAKKEVDRLVKRNEDLMRRNREEVERWKRELEEDRR

SEQ ID NO: 11761 - protein, 179 aa, Artificial Sequence; identical to SEQ ID NO: 11760
  Synthetic

SEQ ID NO: 11762 - protein, 179 aa, Artificial Sequence
  Synthetic
SEVDEVLKTLKKLSDDARKKTKEVLDRLRDISRRVEEESRKVLEEIRRKVEEVKKRRDDDAVKEVMKDADRLLKRLEEIHRKVMDELDKLLKRVEEIHRETIEELKRLLKDVTDKVSKGSKDKVRKVKEDVRRLVEDNKRIVKEAREEVERLKERNKDIVRRIKETVDRLKDELRKRAE

SEQ ID NO: 11763 - protein, 179 aa, Artificial Sequence; identical to SEQ ID NO: 11762
  Synthetic

SEQ ID NO: 11764 - protein, 179 aa, Artificial Sequence
  Synthetic
SDVDRVLKELEDISKDVEDKTREVLKRLKEISDEVKKRSEDINREIARIVEDLERRRDERFVERVKREADRLLKESRDIHRRVMRELEKLLEDVERIHREAIKTLEDLLRKVEKKVSKGDKEKVKDARRVVRELVERNKEIVRRAAEVVKKLKKENAKLVEDNTREVKKWKERLERRRR

SEQ ID NO: 11765 - protein, 179 aa, Artificial Sequence; identical to SEQ ID NO: 11764
  Synthetic

SEQ ID NO: 11766 - protein, 177 aa, Artificial Sequence
  Synthetic
SEVEDLLRKLKEISDESRERIKRLLEELEEISRKSKEDSERSNEELHRIVKRLKEENRDEAVERVKDALRRVLERDRELVERSIRVLKKVVDDVRRIVEESVKRLRDVVRKVRRDVEREEDLRRAEDDVRRLIEDNKRLLEEAKRRVDDLRRKNEEILRESEKNVRRIEKELEDRRR

SEQ ID NO: 11767 - protein, 177 aa, Artificial Sequence; identical to SEQ ID NO: 11766
  Synthetic

SEQ ID NO: 11768 - protein, 177 aa, Artificial Sequence
  Synthetic
SEVEDLLRKAEEISDRSRREIEKLLRELERIVREVRERSKRSNDELHRIVKELKEERRDEAVERVKRVLEEVVKRDEEIVRDVARLLERVVKEVERIVRESVEMLKRIVETIRRDLEDEKKLRDVEKRARELIRDNERLLEDAKRRVDELRRELKKILDDSRRNVERIMKELDDEKR

SEQ ID NO: 11769 - protein, 177 aa, Artificial Sequence; identical to SEQ ID NO: 11768
  Synthetic

SEQ ID NO: 11770 - protein, 177 aa, Artificial Sequence
  Synthetic
SEVDELLKRLEEISEESRRRSEDSNREVHEIVKEVKKRSEDSNRRLHKIVEDLKRENKDKAVEEVKEVLREVVERDEEIIRRVRERIRDLVRRDERIVRESVKRLRKVVEDVRRDVEDKDELKRAEDRVRELIKENKRILDESKENAERIDRELKKILEDSKRNVEEIAKRLEEDRK

SEQ ID NO: 11771 - protein, 177 aa, Artificial Sequence; identical to SEQ ID NO: 11770
  Synthetic

SEQ ID NO: 11772 - protein, 177 aa, Artificial Sequence
  Synthetic
KDVEKLLRELEKISEDSKRESDKSNKEVHDSSREVERRSRESNRRLHKVVEDLKRTNRDEAVERVKELLKKVVEEDKRIAEEDEERIERVLRRDKEIVRKSVEDLRRVVDKVRTRVERDEDLRRAKREVERLIRENEKILEDSRENLRRIAERSRRVLEESERNVRRLIEELEETRR

SEQ ID NO: 11773 - protein, 177 aa, Artificial Sequence; identical to SEQ ID NO: 11772
  Synthetic

SEQ ID NO: 11774 - protein, 177 aa, Artificial Sequence
  Synthetic
REVEELLKDLRRILEEVKRRIEKLLDELRKISEESRRRSEKSNEELHDIVKKLKDENKDEAVERVEEVLKKVLERDKRLVDRSVEELRRVVEEIKRIIDRVVERLEKVVEDVRRDVKDEKTLRDAEREVKKLIDTLRKILEDARREVKKLIDKNEKILRDSEKNVRDIAEELRRTRK

SEQ ID NO: 11775 - protein, 177 aa, Artificial Sequence; identical to SEQ ID NO: 11774
  Synthetic

SEQ ID NO: 11776 - protein, 177 aa, Artificial Sequence
  Synthetic
DEVRELLREVKEAVDEVRRRSEESNREAHRVSEESEKRSRESNKRLHEIVEDLKRRNKDEAVEEVKKALRRVVEEDKRLVDESVERLEELVRRDEEIARRLEEKAKKVVEKVRRDLEDEEKLKRAEEEIRKVIEDLRRILRESRENAKRIIRRNREILRESKKNVEDLERELEETRR

SEQ ID NO: 11777 - protein, 177 aa, Artificial Sequence; identical to SEQ ID NO: 11776
  Synthetic

SEQ ID NO: 11778 - protein, 177 aa, Artificial Sequence
  Synthetic
SEVEELLKRLRESSRRVRELSKRSNEEVHRSSDKVRRDSEESNRELHKIVEDLKRENRDDAVRRVKKRLDDVVEKDRKIVEDDVKLARDVVERDRRIAEEDVRELERVVKEVERDLEDERKLREARKEVKKLIEESREVLERSERNIRELIKESRRLLEESRRNVERLKKELEDTRK

SEQ ID NO: 11779 - protein, 177 aa, Artificial Sequence; identical to SEQ ID NO: 11778
  Synthetic

SEQ ID NO: 11780 - protein, 180 aa, Artificial Sequence
  Synthetic
SEEDEARKDVKELEDRLRKINEDSERAVRRIEEELKRILEENDREVKRLLRKIEELLRRKSSEEIKKLVDDLKKIAEDVLREAKKSVDDLRRILRKVLRDSSELVKELKEILERALRVVEAGVDIETVIRELRKALEEAARRSKRLIDELKKVLEEVKRANEETNKRLTEVVEEVAERIR

SEQ ID NO: 11781 - protein, 180 aa, Artificial Sequence; identical to SEQ ID NO: 11780
  Synthetic

SEQ ID NO: 11782 - protein, 180 aa, Artificial Sequence
  Synthetic
KEKEDAEREVERLERESRRVNRESEEEIKRLLRESEKVNEDSEREVRRIREELERLLRKKEDDEARRMVEELEKILKEVLERSSELVERDREILERILRESSRLVDEDRRILEEALRVVREGVDIDKVLTELRRSSEEVTRLSEELIERVARSSRKVKELSRKLIEELRKVLKDVARRLE

SEQ ID NO: 11783 - protein, 180 aa, Artificial Sequence; identical to SEQ ID NO: 11782
  Synthetic

SEQ ID NO: 11784 - protein, 184 aa, Artificial Sequence
  Synthetic
EELERLEKDLREVIKDSERSSDDVRRRLEEVIRDNERLLEELDERLKEVIRDVEDLLRKKDREDVKRLLKELRERVDKVRKDAEDLLRRSRKIVTEWIRRSERAVEENRRVVDEVRKEAAKEDKNKKLIDDLRRKIEESLKDSRRLDEEARKEIERISRKTREDIKELLDRIKEVLDEIRERIR

SEQ ID NO: 11785 - protein, 184 aa, Artificial Sequence; identical to SEQ ID NO: 11784
  Synthetic

SEQ ID NO: 11786 - protein, 184 aa, Artificial Sequence
  Synthetic
DELEDLERKLKEIIDDSKRLLDELEKRLRESNREVERLLDELRKELEKVIRDVEELLKKKPREEVAKLLEDLRRKVKEVEEELRRMLKKNRDVTREVKKEADKALKENERLADEVRKEATREDKNKELIDKLVRELEKSLEESRRLIEELRKEIERTSREIEKRIRDLLKEIKDVLDDIRRRIE

SEQ ID NO: 11787 - protein, 184 aa, Artificial Sequence; identical to SEQ ID NO: 11786
  Synthetic

SEQ ID NO: 11788 - protein, 183 aa, Artificial Sequence
  Synthetic
SELEEVEKRAEELARTLEELNRDVNRRLEELLRRLEKINRTVNDELRKLLEELKDVRRRGKKDVEETLKRVEDRAEELVREVKERTKEVVRRAAELVRKVVEDSRRVAEEIRELAREVAERVESKEDLDRLDKRVRDIVRDLERINEETRKTLEEIRERLERILKRTEENLKEIKEEVRKDEK

SEQ ID NO: 11789 - protein, 183 aa, Artificial Sequence; identical to SEQ ID NO: 11788
  Synthetic

SEQ ID NO: 11790 - protein, 183 aa, Artificial Sequence
  Synthetic
SELEKVTEDVRRLLERLRDINRRVNEALRRLAEELKRLNDEVNKLLRELVTELKKASKDGVPNVEEAVDRVLEELERLVKTVKDISREVAKRLEDLVRRVVEETDKVLRKIRDDVDKVLKRVEDKDKLEELKREVERIEKDVREILKRTEDNLRRIVEELKEINERTEDSLRKIVRELSEDRK

SEQ ID NO: 11791 - protein, 183 aa, Artificial Sequence; identical to SEQ ID NO: 11790
  Synthetic

SEQ ID NO: 11792 - protein, 183 aa, Artificial Sequence
  Synthetic
REKDELRKKVEELLKRLEEISKRTKDSVERVLRELDKITKESKKRAKKLVDRLKELLKRVTDERVKEIVRDVLRKIDKLVRDVARLNEEVKKRIKDLVREVEKRNRDVLDEIRKLVEEVERRGDERAIEEVLKTIEELIKEVEDVNRRVNETIRELLERLRRANEDVIRKVEKLIKEVEDATR

SEQ ID NO: 11793 - protein, 183 aa, Artificial Sequence; identical to SEQ ID NO: 11792
  Synthetic

SEQ ID NO: 11794 - protein, 183 aa, Artificial Sequence
  Synthetic
SEKERLRDMLRKIRETLDRISEDTKRSLDEVRRRLEEISKRTKDNARKLVRELEELLRRVSRKEVKKIVDDVRRRIEELVKEVEETNKRVLEEAKKLVEEVVKLNKTVLKEATRLIEEVERRMDEEFVKRVEDTLRELLDRVRRENERVNRDIDRLLKEVEERNKRVNDELRKLIEDVKEAAR

SEQ ID NO: 11795 - protein, 183 aa, Artificial Sequence; identical to SEQ ID NO: 11794
  Synthetic

SEQ ID NO: 11796 - protein, 186 aa, Artificial Sequence
  Synthetic
DDVRELIERLERILKRVEDINRDVNRKLRRVLERVRKDNEDSNRKTEKVLRDVKERADEIRSDEDALKKLVEEVERVLEEDIRRSEESVDEVRRVLEEVIRRSEETVKEVEEVIKEVEDAVRRASISEKLLRDVERELKRVREDLERILRESRDVVRRVKEELDKILEESRRKVEKVRKDLEDTRK

SEQ ID NO: 11797 - protein, 186 aa, Artificial Sequence; identical to SEQ ID NO: 11796
  Synthetic

SEQ ID NO: 11798 - protein, 186 aa, Artificial Sequence
  Synthetic
SEVEKLITDLRRILKEVEERNRELNKRNDETLKRVEETNRRVNKELKEILDRVIDEARRKREDRDLLRKLVREVEEVLKKVLRDSEETAKEVERSTREVETISRKTVDEVRKVIERVKEAVERLEISEDLLRRVEEELRKVEKDLKRILDKSRDDLRKSRERLERILRRSEEIVREVEERLRRAAT

SEQ ID NO: 11799 - protein, 186 aa, Artificial Sequence; identical to SEQ ID NO: 11798
  Synthetic

SEQ ID NO: 11800 - protein, 186 aa, Artificial Sequence
  Synthetic
DEVRKIIKELEEILEEVRKRNEKLIRENEETLERVRKINEKAIRELEDILRRVKEAVERKREDERLLRELVKTVKKVLEDVEKKSEDTLDEVRRSTERVIRESERSVEEVRRVVKKVLEMVRRLEVSEDVLRDAERRVREVREKLERINKTSRDRLKRSKEEADRINKESREVVKRVKEELEKTAT

SEQ ID NO: 11801 - protein, 186 aa, Artificial Sequence; identical to SEQ ID NO: 11800
  Synthetic

SEQ ID NO: 11802 - protein, 186 aa, Artificial Sequence
  Synthetic
DEVERVIRELERILREVEKRNRDVLRKNEETLREVRERNERAIEELRRILKKVKEEAERKREDEDALRRLVKRVEEAIKRVRELSERSVRKVEESTKEVEDDSRRSVETVRRMLEKLRREVEKLEVSEDVLRTVRKKVEEVREALDRINETVKKALDDSRRRLEKINRDVRRDVEKVREDLERTAT

SEQ ID NO: 11803 - protein, 186 aa, Artificial Sequence; identical to SEQ ID NO: 11802
  Synthetic

SEQ ID NO: 11804 - protein, 186 aa, Artificial Sequence
  Synthetic
DEVKKLIDDLRKILDRVRKENRRVIEELRKILEDVERRNREAIERLERILRRVVDLMRKKREDRKMLEDLVREVERAIERVEKLSEESLDEVRRVIEEVKRRSDKTVKDVRDALKEVLEAVERLQVSEEVLKRVREEVDRVRRELDRINEDSERVLRDVARELERINREVRKRLKEVEKRLREAAK

SEQ ID NO: 11805 - protein, 186 aa, Artificial Sequence; identical to SEQ ID NO: 11804
  Synthetic

SEQ ID NO: 11806 - protein, 186 aa, Artificial Sequence
  Synthetic
SEVEKIIKELREILERVREDNRKIIDDLRKILKEAEDTNRKVIKELKEILKDVSKLMKEKRSDEDALRRLLEEVDRVIKDVIRLSNESLKEVERVIEEVERRSRKSVEEVRRVIKRVLEMVKRLEVSEELLKEAEKDVRRVKEKLDKINRDVREELKKVAEDVKRINDRSREELRRVKEELKKDSD

SEQ ID NO: 11807 - protein, 186 aa, Artificial Sequence; identical to SEQ ID NO: 11806
  Synthetic

SEQ ID NO: 11808 - protein, 186 aa, Artificial Sequence
  Synthetic
KEVEKVIEELRKILDDARRENERLLRELEEILKRVEERNRKLLEDLRRILEEVRKKAKDIRRDKDALDKLVREVDKVIKRVKEESDRSVEEVRRVIEEVITRSEKSLRDVERAIERVKETVDRLQVSEEVVKRVEEELKKVKEDVERINKEVRDRLREVEERLEKINEDTERTLKKVKDELEETKR

SEQ ID NO: 11809 - protein, 186 aa, Artificial Sequence; identical to SEQ ID NO: 11808
  Synthetic

SEQ ID NO: 11810 - protein, 179 aa, Artificial Sequence
  Synthetic
DELRDVLRRLREVLTELEKENRKSIEELKKLNEDVARDIKRVIDELRKLLKRVKEEIEKNKDSKELIERLLEEVEKAVKRIDELVKKLLDDNKRVVDESRELARRTLETVEEVVRKILETADKDEEVRKELEDVRRKAEKILRDNDERLKESNRHMEKLLREVKEELKRVRDAVEEARK

SEQ ID NO: 11811 - protein, 179 aa, Artificial Sequence; identical to SEQ ID NO: 11810
  Synthetic

SEQ ID NO: 11812 - protein, 179 aa, Artificial Sequence
  Synthetic
DEVRDVIKKLKDLNDRLDDENKKSIEDLKRELERLERRNRDSIRRLEELLKDVADKIRRRRDDEELVERLLREVKKVVEDSRRLAEETLKEVKDIVKRSEELARTTLERNRDVVKKIIEAADKDKDVRKRLRESNEHMKELLKENKELLKRLEDEVKRILERNKKELDRVLRRAEELRK

SEQ ID NO: 11813 - protein, 179 aa, Artificial Sequence; identical to SEQ ID NO: 11812
  Synthetic

SEQ ID NO: 11814 - protein, 182 aa, Artificial Sequence
  Synthetic
RSVEEVRKVLEELKREHEKISKKTEEVLEDLKRRHEEIIKRVRDVLREIEEDLRRIRSRVDDELKRVLSEVLERVRRLVKELEDILKDSLRKIEKLVRELHEINKRSLDTLRELADRLAKDDTDEKVEKVIRELRRSVEDSKRRNDEAIRRLEESVRKSSDEVRRAIKELRDLLKKVRDTTK

SEQ ID NO: 11815 - protein, 182 aa, Artificial Sequence; identical to SEQ ID NO: 11814
  Synthetic

SEQ ID NO: 11816 - protein, 182 aa, Artificial Sequence
  Synthetic
STVERVREEADRLRKEHERISDETRKVLRKLEEDHERISRRTEELIERIEREVRKIESRVDEDLVRELREVLKEVRRLAKEVHEENKRSLDRLRELVERLHRENDKSLREIDKLADELAKDDDDEKVKRVEEEVRRSVEESKKENKKVIDDARRSVKRSEDRNREVIKEVKRLLDTVRERAK

SEQ ID NO: 11817 - protein, 182 aa, Artificial Sequence; identical to SEQ ID NO: 11816
  Synthetic

SEQ ID NO: 11818 - protein, 182 aa, Artificial Sequence
  Synthetic
STVEDVRRRADELRRRHKKISEETERVLRRIEEAVRRILEDLRRILKEIEDRVRELLSRVDEKLKRVLEEVRRRLKKLVEELERRLTEVLKRVRELIRKLHEDNKRSLERIDKLADELAKDDDDEKVKEAKRRVTESVRKSKDRNRRVIEEVDRLLKRVEEEVRRVKEEAKELLREVAERTK

SEQ ID NO: 11819 - protein, 182 aa, Artificial Sequence; identical to SEQ ID NO: 11818
  Synthetic

SEQ ID NO: 11820 - protein, 177 aa, Artificial Sequence
  Synthetic
SSVEKVIEDLRRISEKVKKRTEDVLREAEKILRRVEKDNKKVNDDARRIVEELERRGDEKAAREVVKKVEDLLKELKEIDEEVARRVRKLVKELKEIHRKVIEDVRRLVKELEDEGIEKRLVDRVREAAKDIEDENREVLRRVEEILRRIEEELKRSSDETEKAVREIKRRLDERAR

SEQ ID NO: 11821 - protein, 177 aa, Artificial Sequence; identical to SEQ ID NO: 11820
  Synthetic

SEQ ID NO: 11822 - protein, 177 aa, Artificial Sequence
  Synthetic
EEVERVLEEIKRISTDVARRSKEVLKRARESSERVKRRTEEVLEEIRKTNEDVARRADEELFKKVVEDNKRLLDRLREEHRKDDEVVRKLLKELEDIHRKSIEEVRRLLEDLERRGIDKKVVDRLRKEVKRNEDENREMVREVEEEVRRLEKENEEAVRRAADIVRRSEEHLRERTR

SEQ ID NO: 11823 - protein, 177 aa, Artificial Sequence; identical to SEQ ID NO: 11822
  Synthetic

SEQ ID NO: 11824 - protein, 184 aa, Artificial Sequence
  Synthetic
KEVEDLLREVEKSSEKVRELIERSIRELERILEKVAEEIRRSIEELEKILERVAEVAKRRDRELVKRIIEEVLERVDRVNKENEEIIRKVAKEVDDVNDRNRKIVTENKKELERVLREIRNLPVDEKIVKRVEDEIRRLMKKSDELLERSTKVVEDIKRELEKLLETSSRMAEDIKRKLEELRR

SEQ ID NO: 11825 - protein, 184 aa, Artificial Sequence; identical to SEQ ID NO: 11824
  Synthetic

SEQ ID NO: 11826 - protein, 184 aa, Artificial Sequence
  Synthetic
SEVEKLIEELERILEEVARRLKKSNEDLRKILKEVAKRIKDSIRDLRRILEEVADELRRRSEELVERIIRDVLRRVDKVNKENDEIIKRVEETVRRVLDRNRKIIKEVEDTVDKVLKEIRDLPVDERIVEEVERAAEEIKRRLEELVRRSEKSVEEIERELRKLLKDSSDVVREIKKRLEDERR

SEQ ID NO: 11827 - protein, 184 aa, Artificial Sequence; identical to SEQ ID NO: 11826
  Synthetic

SEQ ID NO: 11828 - protein, 184 aa, Artificial Sequence
  Synthetic
SEVEKLLKEVEDSSRKVEEDLRDSNRELKKILDEVADRIRKSIKRLEDILKKVAEDAKRRDKELVEKIIKEVLDDVERVNRENKRILEEVRKRVDEVLRRNREIVKENEKLLDDVLKEIRDLPVDEKIVRDVERRVRELKERSRRIVEESERSAREIKRELKRLEDDSSRVVEDIRKKLEELAK

SEQ ID NO: 11829 - protein, 184 aa, Artificial Sequence; identical to SEQ ID NO: 11828
  Synthetic

SEQ ID NO: 11830 - protein, 184 aa, Artificial Sequence
  Synthetic
REVEELIKRVEESSRDVERRLRESNEEVERSTRRVAEEIKKSIDRVREIVERVERKKERVSEDILRDIARRVSEFVRRANKRNEKIARDNRRRVREVLRRNREIVKRNKELLDKVLEEIERLPVDEKIVERVRRVIEELKRRSDEIVKESERSVRRVEKETTELLEESSRAVERVERRLRELVR

SEQ ID NO: 11831 - protein, 184 aa, Artificial Sequence; identical to SEQ ID NO: 11830
  Synthetic

SEQ ID NO: 11832 - protein, 184 aa, Artificial Sequence
  Synthetic
SEVEKLIEEVRRSSKKVEEDLDRSNRELEDILRRVAEELEKSNRELEKILKEVAERVKRREERLVKKIVEEVERKVDEVLKRNRDIIRKVEETVERVLRRNRKIVDDNRKLLDKVLEDIRRLPVEEEIVKRVEEEARRLKERSREIVKRSEDSAREITKALRKLVRDSEDSVRKIKEKLKEETR

SEQ ID NO: 11833 - protein, 184 aa, Artificial Sequence; identical to SEQ ID NO: 11832
  Synthetic

SEQ ID NO: 11834 - protein, 184 aa, Artificial Sequence
  Synthetic
REVEELDKRLKESSTEVEERLRRSNREVEDSTRRVEEEARKSNEELREILERVAEDVKRRRKEEVDKIVRDVDERVKEVLKRNEDIARENERLLDRVLKRNKEIVEENEKLLRKVLEDIRRLPVEERIVERVERSARELMRRSRDIVRRSKESIERLKKRTRDLVKESRESVEKIKRDLEELRR

SEQ ID NO: 11835 - protein, 184 aa, Artificial Sequence; identical to SEQ ID NO: 11834
  Synthetic

SEQ ID NO: 11836 - protein, 184 aa, Artificial Sequence
  Synthetic
SEVEKLLKELEDSSKKVEDDLRKSNEELRKIVEEVADLIRRLNKELEEILREVRERMRRVSEEEAERILREVAERVKRVHDESREIIERVLRDVERVLEENERIIKENKERLDKVLKEIRDLPVDEEIVRRVEKIVRDLKRRSDELVRRSRKSVEEIRKELEELVERDRRSVERIKEELDKERK

SEQ ID NO: 11837 - protein, 184 aa, Artificial Sequence; identical to SEQ ID NO: 11836
  Synthetic

SEQ ID NO: 11838 - protein, 184 aa, Artificial Sequence
  Synthetic
SEVEKLTKEVRDSSKRVEDELRKSNERLKESTDRVADEIRRLNKELKEILDKVAREVERRDKKLAEDIIRDVKKKVDEVHKESRDIAEENKKLIDEVLRRNREIIRENMERVERVLKEIRDLPVDEEIVERVERDARKVKEDSKRLVEESEESVRRLKTDTERLVEEDKKSVDTIKEELKKLTK

SEQ ID NO: 11839 - protein, 184 aa, Artificial Sequence; identical to SEQ ID NO: 11838
  Synthetic

SEQ ID NO: 11840 - protein, 184 aa, Artificial Sequence
  Synthetic
DEVEELRKELEDSSREVEELIRRLNKEVEKSTREVAKRVKDSNKRLDEILKKVAEEVKKRSKETAKRIIEEVMRRVREALRRNEEIAERNRRLLERVHDTSRKIVETNKDRLDRVLERIRNLPVDREIVERVREEVEKLKKRSEDLLERDKESIDKLDKETKELVEESRKSVRDIERELKKLSD

SEQ ID NO: 11841 - protein, 184 aa, Artificial Sequence; identical to SEQ ID NO: 11840
  Synthetic

SEQ ID NO: 11842 - protein, 184 aa, Artificial Sequence
  Synthetic
DEVEKLIKDVEDSSREVEERIRDLNRKAKKIVREVAERIRELNERLKEILDKVAEEVKRRDKELAKEIIKKVLEDVRRVHKESRDIIREVKEVLDRLHKTSEDILRKNKELLDKVLEDIRRLPVDEEIVKRAEKRIRELKKKSDELLKRDRDSMDRIKKELEKLTREDEESVRRIERELKRLAD

SEQ ID NO: 11843 - protein, 184 aa, Artificial Sequence; identical to SEQ ID NO: 11842
  Synthetic

SEQ ID NO: 11844 - protein, 184 aa, Artificial Sequence
  Synthetic
SEVEKLIEEVRRSSEEVERRIKKLNDDVRRSTEKVEEDIRRLNEELKKILDEVAKEMERRDKEEVKRIIEEVEKRVKEVHDRSREIAERNKKRIDDVHRESARIAEENKEELDKVLKRVRELPVDERIVRRVEKIIRDLKKRSDELLKEDRRSAEEAKRETDRLVEEDKRSVDEIRERLKELSR

SEQ ID NO: 11845 - protein, 184 aa, Artificial Sequence; identical to SEQ ID NO: 11844
  Synthetic

SEQ ID NO: 11846 - protein, 184 aa, Artificial Sequence
  Synthetic
DEVEELLRRVEEIVERVAKRIEELNRRLEEILEEVARRSTKSIKELEDILRKVAKEMERRRKEEAKKILDKVVKDVEEVNKRDEEIARRVEKIVKDVHRDSRRIAEEVLRFLDRVLERIRELPVEEEIVERVERRIRELKKRLEKLVRDDEESVKEIRKKLEELVKRSSDVVERIKRELDKLRK

SEQ ID NO: 11847 - protein, 184 aa, Artificial Sequence; identical to SEQ ID NO: 11846
  Synthetic

SEQ ID NO: 11848 - protein, 184 aa, Artificial Sequence
  Synthetic
SEVEKLLRELRESSREVEERIRKLNRELEKIVRDVDRESARSIEELKRIAEEVAERAKRRDKEDVKRILERAVEEVRRVNKRDRDIIREVLKLVDDVHEESRKIVEDNKRTLEKVLEEIRRLPVEERIVKEVEEEVRRLKKRSTKLLEDDRKSVEDIKERLKELVRRSSEVVKEIEERLKRLEK

SEQ ID NO: 11849 - protein, 184 aa, Artificial Sequence; identical to SEQ ID NO: 11848
  Synthetic

SEQ ID NO: 11850 - protein, 184 aa, Artificial Sequence
  Synthetic
SEVEDLLRRVRESSKEVEERIRKLNDELRKSTKEVEDRSRRSIERLDRIVEKVAREVERRDKELVSRIIKRVLEDVDRVNKEDKEIAEENKKEIDRVHEESRRIVEENKKLVDEALERIRRLPVDEKIVRDVEREVRRVKERSDRLLEEDRKSVEELKTRTDRLLEESSKRAEDIKRKLKELEK

SEQ ID NO: 11851 - protein, 184 aa, Artificial Sequence; identical to SEQ ID NO: 11850
  Synthetic

SEQ ID NO: 11852 - protein, 184 aa, Artificial Sequence
  Synthetic
SEVEKLLREAKESSREVKDRSKKSIDELRESTKTVERLIRDLNRKLKEILDRVADDMRRRDKELAERIIREVLKRVDDVHRESKKIADENKELLKRVNDRDREIVKRNDELLDEVLKRIRELPVDEKIVRRVEEIVRRLKKESKDLVEESTRVADELRRRTDRLVEEDERSVRKIKEDLDRLRK

SEQ ID NO: 11853 - protein, 184 aa, Artificial Sequence; identical to SEQ ID NO: 11852
  Synthetic

SEQ ID NO: 11854 - protein, 181 aa, Artificial Sequence
  Synthetic
SEKEEAKRRARELEKRTDELLEESTRVNEESKRHLKELLDESRRTAKRVKEEIDKLLKEKREGDRVEELVKELKKIIDEVLKRNEELIREAERIDDESNKRNEELARRDKEIIRELLRLVEEGVDVDTLLERVDRSSKEVADRMRKSNEEVKDVNRRVAKALKDSNRDVERVLEDVARKIK

SEQ ID NO: 11855 - protein, 181 aa, Artificial Sequence; identical to SEQ ID NO: 11854
  Synthetic

SEQ ID NO: 11856 - protein, 181 aa, Artificial Sequence
  Synthetic
SEKETARKVIEELRKETERLLRESTKTNEDSSRHAKELLKRSEDVAREIEERIDRLLEEKKDGDEVKRLVEELKKRVEELLRRNEELVRRLEEIDKRSNDENRKLAEEDKRRLEDAERRVEEGVPIEEVIKRLEDSSRDVERRLRKSNEDVKRVNKEVADRLKESNDRLREELKKVEDDIR

SEQ ID NO: 11857 - protein, 181 aa, Artificial Sequence; identical to SEQ ID NO: 11856
  Synthetic

SEQ ID NO: 11858 - protein, 181 aa, Artificial Sequence
  Synthetic
DEKEDAERKIRRLEERTKKLLDDSTKTNKESRDHLRKLLADSEKTARDIKRAIKKLLDDKKDGDEVRRLVEELKKIIDKVLEDNKRLIEEVEKIDKDSNDENRKLVDDDRRKLEEVRKLVEEGVDVDTLLTEVTDSSRRVEEELKRSNDEVRRVNREVAERLKKSNRELEEVLRKVAEDIK

SEQ ID NO: 11859 - protein, 181 aa, Artificial Sequence; identical to SEQ ID NO: 11858
  Synthetic

SEQ ID NO: 11860 - protein, 181 aa, Artificial Sequence
  Synthetic
SERERAEEEAKKAKKEAKRLLDESTKANEDSKRHADKLLEDSKRAAEDIKRKAEDLLRKKKDGDRARRLAEEARKIADKAVEDSERLAREAAKIDKDSNDESRRLAREAEEIADRALEAVDRGADARRAIEEVRRALKEAADASRDLNRRAKEANERAAKASEELNKRAEDALRRASEEIR

SEQ ID NO: 11861 - protein, 181 aa, Artificial Sequence; identical to SEQ ID NO: 11860
  Synthetic

SEQ ID NO: 11862 - protein, 181 aa, Artificial Sequence
  Synthetic
SEKEEVKKRVDEIKERLKRLLDDSTRTNEESRKHIEDLLEESKKEIDKVRKDLERLLRKKEEGDRVRELIKEIERILEKAVRDSKELVDRLRKIDEDSNRESKRLIEEVEEILDRALELVKAGVDVDTMTRKVEEVLRDVAEKIKELNRRVEEANKDMARESERLNREVRDVLRKVAKDIE

SEQ ID NO: 11863 - protein, 181 aa, Artificial Sequence; identical to SEQ ID NO: 11862
  Synthetic

SEQ ID NO: 11864 - protein, 181 aa, Artificial Sequence
  Synthetic
SDEDRAREDLKRIKEELKRLLRESTEVNKESEKHIRKLLRESEETIRRLKKAIDDLLRKKREGDEVERLVREAKTRLDEVLKRSKELVDTLREIDKKSNKDSRKLVRDAEEILDRALRLVEAGFDIETILRRLERVLKEVEKKSRELNRRVKEVNEKVRRDIERLNKEVKDVLKTVAERIT

SEQ ID NO: 11865 - protein, 181 aa, Artificial Sequence; identical to SEQ ID NO: 11864
  Synthetic

SEQ ID NO: 11866 - protein, 181 aa, Artificial Sequence
  Synthetic
DEKERAEERIRELKKRTEELLRESTRVNRESKEHAKELLKRSEDTIRELDERIRRLLERKKDGDRVRELVKEAKKRLKEVLEESEDLVRKLEEIDDESNRRSERLVREDERILREARKLVEDGVDVDTVLARLEESSKEVEDRSKRLNEEVKKVNEEVAKRIKELNEEVERVLRRVAEEIE

SEQ ID NO: 11867 - protein, 181 aa, Artificial Sequence; identical to SEQ ID NO: 11866
  Synthetic

SEQ ID NO: 11868 - protein, 182 aa, Artificial Sequence
  Synthetic
SLKEELREKVRKVKEDSERLLRDLERTVKKVREDSKRILDRNRETAKEIERRIRELERNGKISDEAVRRIEEVLKRVIELSERLLRRNEEVLKEVIKKVERMLRENERLLREVEREVDREKDNEELVRKLRKELDDSLKRTKELVDRLKEDLERSLRDSEELARRLDRELEDVLRRIEDEAR

SEQ ID NO: 11869 - protein, 182 aa, Artificial Sequence; identical to SEQ ID NO: 11868
  Synthetic

SEQ ID NO: 11870 - protein, 182 aa, Artificial Sequence
  Synthetic
SLLETLKEIVRRVERESARILEDNRRTVTRAKEESKKILDRNAKTVDDLRKEVERLKTEGKISEELAKEIERVLRDVLRLSKEALERNEKVLREVIETSERALRENRKLLKRVIEEVAREQDNEELVRRLVEELEKSLRTTERLARELDRKIKESLDTSEELARRLDKRLEEVLKDVKRRAE

SEQ ID NO: 11871 - protein, 182 aa, Artificial Sequence; identical to SEQ ID NO: 11870
  Synthetic

SEQ ID NO: 11872 - protein, 182 aa, Artificial Sequence
  Synthetic
RLEEELKKTVDRAREEVKRLLDRDRESVDDLRRAVEEILKTNRRTVEKLRKDLTDLRRNGKIDDELVKRIEEVLKRVERASREALRRIKEVLEEVERKSKKALDDIEKVLREVEDVVRKERDNEKLVRELIEKIKKVLDEVRRLSEKLNEDLREILERVKRLADKLDEELKRMLEKVEETAR

SEQ ID NO: 11873 - protein, 182 aa, Artificial Sequence; identical to SEQ ID NO: 11872
  Synthetic

SEQ ID NO: 11874 - protein, 187 aa, Artificial Sequence
  Synthetic
DDVERVKRDIDRLLEKVTRENEKVKEKMKELLDRAREVNRKVKEDIKRLLKEVEDVARREGGESERVVRRARKVVKDVEDLVREVHKLNEDIVRRAEELVRRLHRLNEEIVREIARLVEEVVRRRGEDTEDVRDLERRLREVEEEARKLSEDVRRVLEEVRKELERLSRDTERVLKRVREEIRKIEK

SEQ ID NO: 11875 - protein, 187 aa, Artificial Sequence; identical to SEQ ID NO: 11874
  Synthetic

SEQ ID NO: 11876 - protein, 187 aa, Artificial Sequence
  Synthetic
SEVEEVIRRVRKLLKDAKDLNEEVKRRLKELLDRVKRVSEKTKEDIKRLLEEVERVVRTKGGETEEVRRRIEDVVRKIRRLSEEIRRILEEVVRRAEELVRRLDELNRDIVRKVKKLAEDVLRSTGEDTDLAERVRDVLRRVAEAAKELSKDTKRVLDEVKKAIDELLKDNKRTVEEVEKEAKKTLK

SEQ ID NO: 11877 - protein, 187 aa, Artificial Sequence; identical to SEQ ID NO: 11876
  Synthetic

SEQ ID NO: 11878 - protein, 187 aa, Artificial Sequence
  Synthetic
DEVEKVKKTLKKLLEDARRRNEEVRKEIEDLDRELERLNRESKKRIEDLLEEVKRVVDRDGGEAEEVRRRIERVVEEIERLSREAAEMNRKVLEEIEELVDRLDRTNKKIVEEAKKLVEDVVRKEGEDTELVRELERVLDTVRREAERLSRKTREVVDESRRRNKKLLEEDERVVRKVVEDAERKLK

SEQ ID NO: 11879 - protein, 187 aa, Artificial Sequence; identical to SEQ ID NO: 11878
  Synthetic

SEQ ID NO: 11880 - protein, 187 aa, Artificial Sequence
  Synthetic
DEVKKVIDDIKDLLRRVEEVSRRVNKELERLLREVREVNKDVKRKLEELLRRVKEVVRRDGGESEEVKRIIDRIVEEAEELVRRVNRLNEEVVREAKELVDRSMKIIEKVVEDIERLVRELLRKEGEDTDLAERVRKVLEDVTRAAKELIKRDKKSLEDVKREIEKLSRDVKRVLEKVAEDAKDTLR

SEQ ID NO: 11881 - protein, 187 aa, Artificial Sequence; identical to SEQ ID NO: 11880
  Synthetic

SEQ ID NO: 11882 - protein, 176 aa, Artificial Sequence
  Synthetic
SEEEDLARVVERVERDLKRLDDDNKRVLDESRRRNEELVKRTAEIVERVRRELERLRREGRVSDEIVERVMREIEKLLRELERINRETIKRNKRLSEEASKINKEVTDRVRELLRDKSERVEEVKRTMEKLLDDVRKANEDSKREIEKSDDEVRKRNEEVVRDIERLLKEVEERAR

SEQ ID NO: 11883 - protein, 176 aa, Artificial Sequence; identical to SEQ ID NO: 11882
  Synthetic

SEQ ID NO: 11884 - protein, 176 aa, Artificial Sequence
  Synthetic
SEEEDLRRRAEEVHRRNEELLRDNERTVKKVHDRNRELLEDLRRVVERIERELRRLEEEGRVSEEEVRKVVETVRKLLKDVEKIVEDSSREVKRLSDEVREVVERSSREVKRLVEEKSSRVEEVKERIDRLHEELEKLSRTTKEKLKELHKRLEDVVREVKRRAEELLREIKERAD

SEQ ID NO: 11885 - protein, 176 aa, Artificial Sequence; identical to SEQ ID NO: 11884
  Synthetic

SEQ ID NO: 11886 - protein, 185 aa, Artificial Sequence
  Synthetic
SEVEEVRKVVEEVKRELRRLSEDSRRVVEEIVEADKRLSEKNETSVREVKKALKKLKDDGVVQEDVVTRVTEEIDRLLRESRESSRESVERIRKLLEDLERVSKEVLERLDRLLEDIERKLSDKDAEELVRDVIRRAREVLKRVEDVHRKVKKDLKKVHDDNKKISEDIDRRLEEVLRKVEEDDR

SEQ ID NO: 11887 - protein, 185 aa, Artificial Sequence; identical to SEQ ID NO: 11886
  Synthetic

SEQ ID NO: 11888 - protein, 185 aa, Artificial Sequence
  Synthetic
SEVEDVKRKVREIEKADEELSKRNEDSARESKKRLKEWSDDTKEVVERVRKRLKDLEDEGKVREEVVKRVKELLDELLDRLRKVSEEVLRRNDKLLKESRDSSRESVRRIRELLEDIRRKLEDEEAERLVREVTKEMKDVHDKNKKLSEDIDKRVEDTNRRLKEVHERVKEEAKKVVRDLEETAK

SEQ ID NO: 11889 - protein, 185 aa, Artificial Sequence; identical to SEQ ID NO: 11888
  Synthetic

SEQ ID NO: 11890 - protein, 185 aa, Artificial Sequence
  Synthetic
SLVETVEDVLREVEERLRKLLRDNEESVERIKKRDEDLSKENEESVKRVEDTLDELRERGVVDESVVKEVKRLVRELLKESRDSSKRSVEVVKELLDESRRVLKELKEEADKLVDRLRDLVDDERVEELVRKVIEDARRLLDDVRRKSERLDREAERVHRENKKLSEDLDRRVKTVVDDVRERAR

SEQ ID NO: 11891 - protein, 185 aa, Artificial Sequence; identical to SEQ ID NO: 11890
  Synthetic

SEQ ID NO: 11892 - protein, 185 aa, Artificial Sequence
  Synthetic
SLVEEVEKEARDIERRDDELSKRNEKVARDIEERDRRLSDEVREVVKRVKRELERLVESGEVDEDVVRRVLELLKEILEEVERSSKKSVDVVKKLLEESEKSSRDSVREVRRLLKEIRDKIDDKDAEKLVRRVIKDLRKLHKENEDLSREIDKRLEDAHKRNRDLVEEVKKRMERVREEVERAAR

SEQ ID NO: 11893 - protein, 185 aa, Artificial Sequence; identical to SEQ ID NO: 11892
  Synthetic

SEQ ID NO: 11894 - protein, 185 aa, Artificial Sequence
  Synthetic
KEKEDVKKVVEDIERADKKLSEDNRRVVKRIEEADRKLSKENKESVERAKKRLDDLERRGEVDRRVVTEVEKTLKEILERSERSSKRSREEVKRLLEESEDSSRRSVEEIRRLLKEIEDKLSREEAEELVRRVIKEMEEVHKRNRDLSKRLDDELKRIHKENEDRLRRLDEEIEKVVKKVEDDAR

SEQ ID NO: 11895 - protein, 185 aa, Artificial Sequence; identical to SEQ ID NO: 11894
  Synthetic

SEQ ID NO: 11896 - protein, 185 aa, Artificial Sequence
  Synthetic
SLVEELRKDVEEIKKRLKRLVEENEKVVREVTEADKKLSKELEDEARDVKRALEELRRRGEVDERVLRRVLEIVDELLERARESSRDSERVVRELLEESRRVVEEVLRRIEKLLEELERLISREEVEELVRRVREDMERVVREVEKVSRDLDREIRRVHRENRELIEDVKRKARKVLRDAEEEAR

SEQ ID NO: 11897 - protein, 185 aa, Artificial Sequence; identical to SEQ ID NO: 11896
  Synthetic

SEQ ID NO: 11898 - protein, 185 aa, Artificial Sequence
  Synthetic
KIVEDVEKVVKEVDDRLKKLVDDNERKVREIIRRDEELSEKNEKSVRDVKEELKRLAEEGTVREEVVRRVEEELRRLLEESRRSSDRSRKRVKKLLDDSRRVADRVREELERLLREVRKKADREEVEKLVREVIDRMRRVVREVEEMSKRLDEELEEVHRRNRETLTRIDEEAKKVVDDVDRRAR

SEQ ID NO: 11899 - protein, 185 aa, Artificial Sequence; identical to SEQ ID NO: 11898
  Synthetic

SEQ ID NO: 11900 - protein, 183 aa, Artificial Sequence
  Synthetic
SVRETLEEVLRRIAEAIDELIKTLEKVLEESRREIERWKKENEDSLREIKKKLEDLEKKIEDERVVRDIRRVLEEVRRLVEESKKILDEVVEDNERLVRELVKELEDVKRKVEELVRDVKRDNTEEKAKRALEEIKRLLERVKKRVEEALEEIKKSNKEAADIVRDIDRRLEELLRTVADKTR

SEQ ID NO: 11901 - protein, 183 aa, Artificial Sequence; identical to SEQ ID NO: 11900
  Synthetic

SEQ ID NO: 11902 - protein, 177 aa, Artificial Sequence
  Synthetic
DEVEEVIKTSREINDRVRRELERVLRRSEEIIEEVAKSIEEVIKESEDIIRKVEKDGDEEALRRAVEESTRLVEEVKRELEEVVERSTRLLEELVRILEEALRRSEELVRDLEARVDKEELKRKIRDVLRDDERAARKWVRDLEEVNKRTEDKIRELLRKLEEVNEKTERDIRRREK

SEQ ID NO: 11903 - protein, 177 aa, Artificial Sequence; identical to SEQ ID NO: 11902
  Synthetic

SEQ ID NO: 11904 - protein, 177 aa, Artificial Sequence
  Synthetic
EEVERVIEEIKKLLKDVAELVERVIKEIRKILDDVAKENKRLLDESRKIIKEVAERGDERMLEDAVRRSNELLKEADRINKEVLKRVRELVKEVERILRDVLRRVDELVKELEKRVDKEEVKRKIRKVLKEIKEEIEKLLKKLRDALRDVEEKIRDLTRRAREVNEKSREDLERRKD

SEQ ID NO: 11905 - protein, 177 aa, Artificial Sequence; identical to SEQ ID NO: 11904
  Synthetic

SEQ ID NO: 11906 - protein, 177 aa, Artificial Sequence
  Synthetic
DEVEDVIRRLEEIIREVEDRLRKILETSKKIIKEVEDENRRVVTEIERILREVEKRADERMLEKVLDDIRKLVEELDRINRKAVEISNRLLEKAKRILDEVLRRVTKLVEDLKDKVDKEELKRRIEEVLERLRRKIERLAKELKDVNDESEREARRLTEEVKRVLEEVARRIKEAAE

SEQ ID NO: 11907 - protein, 177 aa, Artificial Sequence; identical to SEQ ID NO: 11906
  Synthetic

SEQ ID NO: 11908 - protein, 177 aa, Artificial Sequence
  Synthetic
REVEEVRKKIEEDIDRVDKELKEVLETSRDILRRVAKENEDVLRDLERLVDEVRRDSDKDLLEEVLKRVEDLVRELDRKNKEVAERSTRLIEELAKILDDVLKRVEELLEELKRRVDKEELKKKLEKVVRDLSKRLEELLKELEKVNEEVKRRLERLTEEVRKVLEEITKKLKERAR

SEQ ID NO: 11909 - protein, 177 aa, Artificial Sequence; identical to SEQ ID NO: 11908
  Synthetic

SEQ ID NO: 11910 - protein, 177 aa, Artificial Sequence
  Synthetic
SKVEEVMRRLKEILKRVAEELEKVLTESEKILRDVADENRRVMEESRKILKDVAERGDEKALEDALRDSSRLVKDLDEKNRRVLETSTELIERLKKRLEEVLREVKELVDRLKKDVDKEEVKKKIDKVLEDVRKELDDLRRKLEEVNKRIEEEIRRLTEDVRRVNDEIRKRAEDRKR

SEQ ID NO: 11911 - protein, 177 aa, Artificial Sequence; identical to SEQ ID NO: 11910
  Synthetic

SEQ ID NO: 11912 - protein, 182 aa, Artificial Sequence
  Synthetic
SLREKADEVVKRIKERLDRLEDKSREVVKDSRRKLREWYEKSKRAVEDIETKLDELRKDLTDKKAEEILRKVKEDVKRVHEENERILRELKKITDKLHEENKKIIDDVKRKVEDVLRRVRDVDKDMVEELIRELEKIVTDVAKKVEDTIEESRKINEEVAKRVEDTIKRLEDILRDVARRVK

SEQ ID NO: 11913 - protein, 182 aa, Artificial Sequence; identical to SEQ ID NO: 11912
  Synthetic

SEQ ID NO: 11914 - protein, 182 aa, Artificial Sequence
  Synthetic
SLREKVDKVVEEIKRKLDKLLEDSERVVEKSERDLRRWLKEAEEVVREIEKTLKELEKRARDDRLRKIIDEVRKRVERVLEEVEKIIDELRKRSETVHRRNETIIRKVEEDVKRVRDRIERVDKDVVEDLIRELEEIVRRVAEEVRTTIEDLRKINDEVREKVKRLIEELKKILDDVAEEVR

SEQ ID NO: 11915 - protein, 182 aa, Artificial Sequence; identical to SEQ ID NO: 11914
  Synthetic

SEQ ID NO: 11916 - protein, 182 aa, Artificial Sequence
  Synthetic
SLEEKAREVVKEIRRRLDELLRKSHDVVREIEERLDKLEKESEDAVREIEKRLDELAKRITDERAKKILDEVKKEVRRLHEENRKILEEVKKEVRRVNDENRRIIERVKETVDDVLRKVSRVDAKVVEKLIKELRDILREVAERVERTIRRLREIVKRVERKVERSIEEMERIVREAEEETR

SEQ ID NO: 11917 - protein, 182 aa, Artificial Sequence; identical to SEQ ID NO: 11916
  Synthetic

SEQ ID NO: 11918 - protein, 182 aa, Artificial Sequence
  Synthetic
SLREKVDEVVKRIEKRLEELIRKSRKANEDIRKKLEELIKKSEDVVRKIKRELEELKRRVTEDEVKEIIERVLERVERVNEENRKIIEDVLRKSDEVDRRNKDILRRVRERVDEVLEEAKDVEREVVEDLIRELEEILRKVAEEVEDTIRRLEKILKEVAERVERTIKDLEDIVRDVAEKVK

SEQ ID NO: 11919 - protein, 182 aa, Artificial Sequence; identical to SEQ ID NO: 11918
  Synthetic

SEQ ID NO: 11920 - protein, 182 aa, Artificial Sequence
  Synthetic
SLREKVKRMVEEVKRELDELEKESNRAVERVERELEKLIRKSERVNERIRERLKELAARSTDKKVEKILRELKKLSDELDRTNKEIIDRLRKEVREVNDRNRKIIEDVEDFVRRAEDRLRDVEDKVVEKLIKEVRDIVKKVAEEVKKTIEDVERKVKEVAERVEDTIRRLDEAVKEVEERVR

SEQ ID NO: 11921 - protein, 182 aa, Artificial Sequence; identical to SEQ ID NO: 11920
  Synthetic

SEQ ID NO: 11922 - protein, 182 aa, Artificial Sequence
  Synthetic
SLREEAERVIREVREDLDRLRRESKKVNDRIRRTLDELRKRSDDAVRDIKEKLKELAKRTTDEKVKKILKDVEDEVEKVNRENREIIKELEKVSNDLDRRNKEILRTLKKLADEVLERVKDVDKDVVRELAERLKRLLEEVEKRVKDTIRELEKIVEEVRKRVEDTIRRLEEVLDKVAKEVT

SEQ ID NO: 11923 - protein, 182 aa, Artificial Sequence; identical to SEQ ID NO: 11922
  Synthetic

SEQ ID NO: 11924 - protein, 184 aa, Artificial Sequence
  Synthetic
SIEEELKKVLKEIEDRVRKSDKENKEASERIKRTVEELERRLREVLRRIEEAVRKLVREKGEETELVEEVRRLVEELRDRLRKVIEDIRDLVRRLVEHNKRVSDEVKRRVEELKRILEEVLRDSDEKKVKEVVDELRKLLRELEKLSEESNRKLKKLTDDIEKLVRDVEKELRKLLKELAEKIK

SEQ ID NO: 11925 - protein, 184 aa, Artificial Sequence; identical to SEQ ID NO: 11924
  Synthetic

SEQ ID NO: 11926 - protein, 183 aa, Artificial Sequence
  Synthetic
SVEERLKRVLERAREEIKRLLDELERVLEESRKEIKKLSEDLTRANEDTRREIEKLAREITDERLREILERVVRESTRLVEEVHRINEKVLRDNTRLVDEVRKILEEALKRVEELIEELRRVDDERIVKKVEEEIEELVRRVEKRVREVKKRMEDSNREVRKANEEVKKRSEDLLRKVRRDAE

SEQ ID NO: 11927 - protein, 183 aa, Artificial Sequence; identical to SEQ ID NO: 11926
  Synthetic

SEQ ID NO: 11928 - protein, 183 aa, Artificial Sequence
  Synthetic
RVRDELREVLRKAREDIKRLSDKMREVLRESEEKIKRLSDDLRRVNEETKKEIDRLRKEIDKEELKEILKRVVEESTRLVEEANRINREVLRRNEELIREVDRINKEALEEVERLVEELKRVDKKEIFRKVEKEIEDLLEEVRDVNRKIEEEARRSNEDVERVNREIKKRSEELLRDVEKKTE

SEQ ID NO: 11929 - protein, 183 aa, Artificial Sequence; identical to SEQ ID NO: 11928
  Synthetic

SEQ ID NO: 11930 - protein, 183 aa, Artificial Sequence
  Synthetic
SVREELKKALDRVRESIRRLSEELREVLERSEDTIRRLVEDLERVNEETRREIEDLARKIRDDRLRRILEEVLKESTRLVEEVKRILKRVLDENRRLVEEVDRINKDVLREVRRLVEELRRVDDERIMKEIEKRIEDLEREVKEVNREVIERAEESNRRVEELVREAKKRSRELLKRVREEAK

SEQ ID NO: 11931 - protein, 183 aa, Artificial Sequence; identical to SEQ ID NO: 11930
  Synthetic

SEQ ID NO: 11932 - protein, 183 aa, Artificial Sequence
  Synthetic
SVREDLERALRRAAEEIEKLSRDLKRVLEESRKNIERLRRDIERMNEETEKEIRRLAREIDKEELKRILEEVLKRSTELVKRLTEILKRVLDTNTKLVEEVDEINKRVLDEVRKLVERARRVDREEDAEEIKTRIKELIDRVRRVNEEVKERMKKSNEEVEEVVRRVKEESKRLLERVEEDVR

SEQ ID NO: 11933 - protein, 183 aa, Artificial Sequence; identical to SEQ ID NO: 11932
  Synthetic

SEQ ID NO: 11934 - protein, 183 aa, Artificial Sequence
  Synthetic
SLREDLRRVLERARDELRKLSKELKEVLKRSRDNIRKLSEDVKRANERTEEEIRRLTKEIDKDELREILERVLRTSTELVKELNKRNRDVLRENERLVREVDKINKDAAREVTKLVEELDRVDKDEIFKRVKKEIKELVDRVREVNKDVIRRMKKSNDEVKRENEKVIRESEKLLKDVEDARR

SEQ ID NO: 11935 - protein, 183 aa, Artificial Sequence; identical to SEQ ID NO: 11934
  Synthetic

SEQ ID NO: 11936 - protein, 183 aa, Artificial Sequence
  Synthetic
SVRERLEKVLKEVEDSIKELSDDLRRVNKRTEEEIRRLAEDLERVLERIEREIRKLAKEIDKDELREILKRVLEEVERLVREVKEILRDVVRRSSELVERVDKINKDVLEEVRRLVEELRRVDKEEIAERVERTIRKLEDDVRKVNEDVKRRSRELLERVARLVERVKEEAEKLLEDVKRKAD

SEQ ID NO: 11937 - protein, 183 aa, Artificial Sequence; identical to SEQ ID NO: 11936
  Synthetic

SEQ ID NO: 11938 - protein, 183 aa, Artificial Sequence
  Synthetic
SLREDLERVLEEIERELKELSDDLRRMNEETEREIRKLSDDLRRALEKIRDEIRKLAEEIDDKRLEDILRKVLREVEELVKEVNRINREVLRRSSELVKRVDEINKKVLDDVRKLVEELKRADKEEIFRKVKEEARRLVREVEEVNKEVKKRSRDLLREVRKVNEDVKREIERLLRKVAKDAE

SEQ ID NO: 11939 - protein, 183 aa, Artificial Sequence; identical to SEQ ID NO: 11938
  Synthetic

SEQ ID NO: 11940 - protein, 183 aa, Artificial Sequence
  Synthetic
SMREDLRRVLEEAEKKIRKLSKEAKDANRETEKEIRKLSEDVKRVNKESKDEIDRLAEEITDDRLRKILEKVVRESNRLVERLNRINRKVLKESSELIKEVDEINKKVLRDVEKLVEDLKRVDKKEIAEKVKREIEKLVRDVERVNREIIERSEKLLREVREENERVKRESRRLLKEVEKAAE

SEQ ID NO: 11941 - protein, 183 aa, Artificial Sequence; identical to SEQ ID NO: 11940
  Synthetic

SEQ ID NO: 11942 - protein, 183 aa, Artificial Sequence
  Synthetic
SVRETLKKVLEDVRRELKKLSDKLRKVLEDSRRNVKRASDKLREVLKRVKEEIERLRREIDKKELEEILERVLREVKKLVEDVNRINRKVLKENTDLVREVDDINKRVAEEVDELVERLKRVDKEEIAKRIIEEIKKLLDRVREVNEDVIRRMKKSNEDLDRRNEEVRKRIEDLLEKVARDAK

SEQ ID NO: 11943 - protein, 183 aa, Artificial Sequence; identical to SEQ ID NO: 11942
  Synthetic

SEQ ID NO: 11944 - protein, 185 aa, Artificial Sequence
  Synthetic
SLEETAKEVIERSEDHLRRLEETNRKVVEDSERHLDDLTRRIKKVVEDIKKRLDEIEKRGEVDERVLRTLAKKVEDLLRRVEEVVRRVKERTRDHLRDSERVLRELLELSKRILERVRRKSSDERAEELLRTVVKEIEDANRRVEEVSRKNTEDIKEWNKRLEEELRRVVERARRELKKVEDAAR

SEQ ID NO: 11945 - protein, 185 aa, Artificial Sequence; identical to SEQ ID NO: 11944
  Synthetic

SEQ ID NO: 11946 - protein, 185 aa, Artificial Sequence
  Synthetic
SLEETAKRVIEESRKHLDRLRRENERVVKEIRDALRELEKKVEDVVRRIAEELERIRKEGKVPEDVVREVRKTVEKLLRELEDVIRRLKELVDRHLEDSERVVREVKRISDRLLEEVKRKSSREEAEDLLRKVIEDIKELNRELERVSRKNIEDLRRWLEEVREMVKRVEEKAKRVLEELREAAK

SEQ ID NO: 11947 - protein, 185 aa, Artificial Sequence; identical to SEQ ID NO: 11946
  Synthetic

SEQ ID NO: 11948 - protein, 185 aa, Artificial Sequence
  Synthetic
SLEETIEKVVERSKRNLEKLRREIRKVVKESDENLKDVERRAREVVEEIKKALEDIRRKGDVDERVVEEVKRDVDRLEREVKRVLDDLRRVTEELLKRVEDMVRRVLEVSEKLLKEVKDKSSREEAEELLRKVIKESEDLNRRLREEVKKVVREIEEANKRVNDTVRKMEEALKKLLDDLREKAR

SEQ ID NO: 11949 - protein, 185 aa, Artificial Sequence; identical to SEQ ID NO: 11948
  Synthetic

SEQ ID NO: 11950 - protein, 185 aa, Artificial Sequence
  Synthetic
SLEEDMKRVVDESRRNLERVEKENRDVVKESRDNLKKVEDDIRKVVKDIRDELEKIRKRGEVDETVVKRVMDTVRELLKEVKRVIDEVRRRTDEHLKHSKEVVERVLKISEDLLREVEKKSSREEAEELVRRVKETSKRVNEELDKTAKKNVDDIKDWNRRVNEKVKKVKEDAERVLRELEETAR

SEQ ID NO: 11951 - protein, 185 aa, Artificial Sequence; identical to SEQ ID NO: 11950
  Synthetic

SEQ ID NO: 11952 - protein, 185 aa, Artificial Sequence
  Synthetic
SLEETITKVVEESKKNIDRLLEEVRKVVEDSRRDLDRVIDEARKVVEKIDRELKRIEKRGDVDKRVVEEVRKEVKELLDRVREMLERVKRVSDKLLEDLRRLAEEVKKLSTDLLEEVRRKSSREEAEELVRRVKKRSEDVNKKLDEDVEEMKRRSEKLNKDINKDVDRVRKRLEEVLKRLREAAK

SEQ ID NO: 11953 - protein, 185 aa, Artificial Sequence; identical to SEQ ID NO: 11952
  Synthetic

SEQ ID NO: 11954 - protein, 185 aa, Artificial Sequence
  Synthetic
SLKDEIKKVVDDSRRNLEEVKKEITRVVKESRERLEELERDIERLVEKVTRELDRIEEEGRVDSKVVRKVKELIKRLLEEVREVIERLRRRTEKLLEDVKRVVEEVLKVSEKLLRDVERKVSREEAKELVEEVIRRSREVNRDLNRRVREVEKESRDANERVKRRVEEVKRRAREVLERLKKAAE

SEQ ID NO: 11955 - protein, 185 aa, Artificial Sequence; identical to SEQ ID NO: 11954
  Synthetic

SEQ ID NO: 11956 - protein, 185 aa, Artificial Sequence
  Synthetic
SLEEDAKRMVDTNEDRVREWERKIDKVVKDSEKRLRELREDAERMVREIKKELEKIRTEGRVPKEEVKKVLDRVDELLERVEEVVRRVLRVTEELLKEVKRVLKENKEILDRLLKEVTDKSSDERAEELVRRLKKASEDSNEKVARLIEEVIKRSKDVNDDLERDLREVKKRLKDVLKRLKEKAK

SEQ ID NO: 11957 - protein, 185 aa, Artificial Sequence; identical to SEQ ID NO: 11956
  Synthetic

SEQ ID NO: 11958 - protein, 185 aa, Artificial Sequence
  Synthetic
SLEEDAKRAVEESKRTLRELEEENKKVVEDIRRALRRLEEDIKRVVEEIRRELDRIRREGRVDERVLRDVKRLVDELLERVREVIKELEELVKRHLDHSKTVIDRVDEITEELLKDVERKSSDERAEELVRRVKKTIEDVNRKVAKVVKENIKRLREWLKRVEERLKEVKDRLRKVLEDVERAAK

SEQ ID NO: 11959 - protein, 185 aa, Artificial Sequence; identical to SEQ ID NO: 11958
  Synthetic

SEQ ID NO: 11960 - protein, 180 aa, Artificial Sequence
  Synthetic
DVEEDVKRVADDNRRELERWRRDVKKVADEVKDRSRKLERDVERRIREIEKTLEDLRREGLDERVIETLARILKRLLDEVKKLLKDNERVVDRVLTEVDELIRRNEESVRRILEDVKKDRTKEVVKRLKEESKKSNEDVARRVEKLKEELERSTREVERAVRELKKELDEVVREVKERAK

SEQ ID NO: 11961 - protein, 180 aa, Artificial Sequence; identical to SEQ ID NO: 11960
  Synthetic

SEQ ID NO: 11962 - protein, 180 aa, Artificial Sequence
  Synthetic
SIEERLDKLLRDVKRALEELEERIRRSNKRLREAVEKLKKEVEDSNRELDKAVKEVLRRKDEEKAKKLAEAVKRSLDKTRKLVEDVARAIEESLKRVEEIVKRVLKAIEEILEEVRRKVRTEEAVRTAADLLRRVLERVKRLAEELHRHNKEVLDEARKIARDLHRLNEEVLRRVEEATK

SEQ ID NO: 11963 - protein, 180 aa, Artificial Sequence; identical to SEQ ID NO: 11962
  Synthetic

SEQ ID NO: 11964 - protein, 180 aa, Artificial Sequence
  Synthetic
SIEEDLKRLLDEVRKRSKDLKEEVKRSNDRVREDLKRLKEEIDRLLEEARRRLEEIIRRKDREEVKKLLDKIEKVLREVEETVKRLEEDIERSLKKSEELVERALKHDEDVLEDVERRVRDKELVDRARDKIRESLRRSEKIIEELHEHNKDALRRVREEIKRLKDKLKKVVEEVERATR

SEQ ID NO: 11965 - protein, 180 aa, Artificial Sequence; identical to SEQ ID NO: 11964
  Synthetic

SEQ ID NO: 11966 - protein, 178 aa, Artificial Sequence
  Synthetic
DSVERVKEESERTNREIAKLSKKVEDETRKVLKDLEDISRDTERRSREVLERARRDKDKDLLEKLLRDLTETHKEVIKTLEKLLEEVKRIHDRTVEEARRLLEESERIVRKVIKETGEEAELVRELEEVVRENEERVRRLIERNKKLVDDARKRVEELVRRNDKIVKEIEKVVRDIKT

SEQ ID NO: 11967 - protein, 178 aa, Artificial Sequence; identical to SEQ ID NO: 11966
  Synthetic

SEQ ID NO: 11968 - protein, 178 aa, Artificial Sequence
  Synthetic
KSDEEVEKLIREVLKRIEELSREAEKLTDEVRKLLKEISDRVEERSRDVLDKIRRTNDEEVIRRLITELEKEHEEVMRELDRLLKELEDIHRRTIELAKRLLKKVEEIVEKVIREEGEEAELVRKLEKLLEDAERRVRELVKRNKEVVERVKRTVDELKARNKKIVEEIKKVMEEITR

SEQ ID NO: 11969 - protein, 178 aa, Artificial Sequence; identical to SEQ ID NO: 11968
  Synthetic

SEQ ID NO: 11970 - protein, 178 aa, Artificial Sequence
  Synthetic
RELEEVEKKVRTVLEEVRRISEKAEELSRRVLEEARKISEDNEREVRRVVEDVRRENDRELLKKLLEEVRRSSEEVIKRLEDLLRKLEEEHKRVIDKLKDLLRRVREIVEEVIRRTGEEADLVERLKELVKKVEDEVRRLVKRNKDIVDDIRRRVEELVRRNKRITDEVRKEADKLRR

SEQ ID NO: 11971 - protein, 178 aa, Artificial Sequence; identical to SEQ ID NO: 11970
  Synthetic

SEQ ID NO: 11972 - protein, 188 aa, Artificial Sequence
  Synthetic
SELEKVKKEIRELLEEVRKISKESEDRSRKSNDELHKSSEEVEKRIRDLLRELEKIVRELKDGDRETVVRVLDRVVEEVRRIVEEDKRRIEEVLKRDKKLVEESVRLIEKVVRDIEEIVKELERRLREKKDVVKELREVLERAEREARKLIKRNDEILKESEKNARDLIRRTEELLRRAKKRVDELKK

SEQ ID NO: 11973 - protein, 188 aa, Artificial Sequence; identical to SEQ ID NO: 11972
  Synthetic

SEQ ID NO: 11974 - protein, 188 aa, Artificial Sequence
  Synthetic
SDVEEVKKEIARLLEELKRTTDKVKEDSDRSNEEVHRSSEKVKKDIEKLLDELRKVVEELKDGSREEVERLLEEVVRRVKKIVDEDKKKLDDVAKRDEDIVRKDVEELKRVVEEVRRIIAEVKRRLKDLREVVKELEDVLKRAEEVVERLEEKTRRILEESRKNIERLKRETEEMLKRAEDEVKKLKD

SEQ ID NO: 11975 - protein, 188 aa, Artificial Sequence; identical to SEQ ID NO: 11974
  Synthetic

SEQ ID NO: 11976 - protein, 188 aa, Artificial Sequence
  Synthetic
SLVDRVRELIERLLRRLEEIVREVEERLRRSNERLHESSADVERLIRELLERLRDIVRKLEKGDREKVKKVLKEVVEEVRDIVRRDRELLDKVVEENADIIRRVVEELRRVVEEVEKIVRDVKTKLRKDEDVVRELEELLRRAKERVDELKKRLEELLKESREDVERLKKKTDEALKRAEEEVEKLRK

SEQ ID NO: 11977 - protein, 188 aa, Artificial Sequence; identical to SEQ ID NO: 11976
  Synthetic

SEQ ID NO: 11978 - protein, 188 aa, Artificial Sequence
  Synthetic
RDLEEVKKRIDELLKRVRETTKRVEDELRRSNKELHESSRRVEEEIKKLLEELEDVFRKVKDGDRERVKELADRIVEEVKKIVDEDVERLERVVDENRKIVDTDRRDLDRVVEEVTRIVEELKRRLKDKEELVRTLEDMLRRAREEIEKLKEKTRKLLEDSERDVKRLIERTTEVLKRARERVEELKK

SEQ ID NO: 11979 - protein, 188 aa, Artificial Sequence; identical to SEQ ID NO: 11978
  Synthetic

SEQ ID NO: 11980 - protein, 188 aa, Artificial Sequence
  Synthetic
SELEEVKKRIDDLLKRLRDIVDTVRKELRKSDKELHDSSKRVEEEIKKLLEELRRIVETLKKGDREKVTRMLREVVRRVREIVKRDVEELKRVVERNAKIIEDVERELKEAVDRVREIVKELERRLKDLREVVETLRRVLKRAEDDVRRLLEELRELLERSKRNVERLIERTKELLKRAEDEVKKLED

SEQ ID NO: 11981 - protein, 188 aa, Artificial Sequence; identical to SEQ ID NO: 11980
  Synthetic

SEQ ID NO: 11982 - protein, 188 aa, Artificial Sequence
  Synthetic
SLLEKVEEEVRRLLKRLRDIVEEVRRLLEESNERAHRSSKKVKEDIDELLKELEDVVRRVKKGDEEAVRRLLDEVVKTVEEIVRRDVELLREIVEENERIIRKVEEELKRVVEEVRRIVDDVRRKLKDNKDLVKTLEDILERAEREVKKLEDRLRKLLEDSKRNAEELIKRTEDVLEEALRRVEELKK

SEQ ID NO: 11983 - protein, 188 aa, Artificial Sequence; identical to SEQ ID NO: 11982
  Synthetic

SEQ ID NO: 11984 - protein, 178 aa, Artificial Sequence
  Synthetic
SEAERVREILKDAEKKIRDILRRLREINRESARRIEDIKRKLDEILKRNEDDVRRLEKDGADKEILKRALERAEKSVRELRDILKKVLDESSRLVKELEKILRDLLDEVRRLVEEVEKRGDGVEDAERTVRELIKRVEEALERAERASRELIKTVEKVLEEVERRNRKSNEELKEATR

SEQ ID NO: 11985 - protein, 178 aa, Artificial Sequence; identical to SEQ ID NO: 11984
  Synthetic

SEQ ID NO: 11986 - protein, 187 aa, Artificial Sequence
  Synthetic
SLEEEAKELVKRVRDELRKIERTIEKIVEDSRRRLEENRKRNKELIERVEKELRELKKRVTDERIKKVVRDVLEKARKLLEESEEMVRRVERISERTLRTVREVVKEVEKIVEKLLEDVKRKSSDERARDILREAKKMLEKVLRDLRRVLEELRKENEKVLRELEEISKETEDRLREVLRELRERTR

SEQ ID NO: 11987 - protein, 187 aa, Artificial Sequence; identical to SEQ ID NO: 11986
  Synthetic

SEQ ID NO: 11988 - protein, 175 aa, Artificial Sequence
  Synthetic
SVEDEVREVAKKIRRILEKLKRELDRHSKKIEDILEEIRDKNEKAKEEIEEVLRRRLDEEIKREVKRLEERLDEVSDKTRRAVEELIRNNERVVREVERVVRELIEILKEVLRKGGKEDVERVKRELEKVLRELAEEVRESLERVSEVAERLKRENDEVNDRLKKMLEDLLRKAT

SEQ ID NO: 11989 - protein, 175 aa, Artificial Sequence; identical to SEQ ID NO: 11988
  Synthetic

SEQ ID NO: 11990 - protein, 175 aa, Artificial Sequence
  Synthetic
DEVEEVIRRVEESNKRVNEENDRVVRESKEIVRKVEEDNRRAIKESEEMLDRVAKDRDRDKLRDVLRRLKELHRRTIETTKEMADRIRKLHEETIRRTREVLERNRRLAEDVLRRVPNVEEDLRRVVDKSRKNVEEVERKNRDVLRRIDKRAKELEDRNREVLKKIEKTIRDLEK

SEQ ID NO: 11991 - protein, 175 aa, Artificial Sequence; identical to SEQ ID NO: 11990
  Synthetic

SEQ ID NO: 11992 - protein, 175 aa, Artificial Sequence
  Synthetic
SEVDEVIRRVEKSNKDVNDENKRVIDRSKELNREVNERNKEAIKRSRDLADEVRRDRDRKKAEEMVRRIEELHRETIKRTKEVNEEIERLHRETIKRTREVLDENRRLAERVVREVPNVEERLREVVKRSEDNVRKVEEDNRRVLEESTRNVKEVKERNEKVLEEIRKTLEDLER

SEQ ID NO: 11993 - protein, 175 aa, Artificial Sequence; identical to SEQ ID NO: 11992
  Synthetic

SEQ ID NO: 11994 - protein, 175 aa, Artificial Sequence
  Synthetic
SEVDKVRKELEDMAREIEKRAEDVIREIKRSNEEVNRTNEKVIRDSERMLEKAERDRDREKLRRIVRTLEKLHEDTIEFTKKVLERNKELIKKIAEELRRVLKELTERIKDVLRRVPNVEERLDRVREKLERIVREIEDRLRKVLEDSRRNVEEVRRRNEEAVKKIRRILEELER

SEQ ID NO: 11995 - protein, 175 aa, Artificial Sequence; identical to SEQ ID NO: 11994
  Synthetic

SEQ ID NO: 11996 - protein, 175 aa, Artificial Sequence
  Synthetic
DEVDDVIRDVDRTNEEVERENRRVIEEVRKSNEEVNKKNADAEKRSREMAERAAEDRDRRKIEEILERLKDLHKRTIETTREVLKRNEDLMRRTIEDTRRVLRENEEKLRDVLRRVPNVKEKLDRVLERSKKTVEELEKRNREALDRSRRNVEEVEKRNREVVKEIAERVRRLKK

SEQ ID NO: 11997 - protein, 175 aa, Artificial Sequence; identical to SEQ ID NO: 11996
  Synthetic

SEQ ID NO: 11998 - protein, 175 aa, Artificial Sequence
  Synthetic
SEVDKVVEDVKRMLKEVEDRNEKVIRDVEKMLREVEEKNKRVIEDSERVAKEAADDRDREKVRRLLERIRELHERTIKETRDVARELAKLLEDTIRFTRKVLRELEELLRDVLRRVPNVKEKLDKVLEEIREIVKRLEDRNREALRRIKEIVDRLEKRNRKVVEDVERIVREIER

SEQ ID NO: 11999 - protein, 175 aa, Artificial Sequence; identical to SEQ ID NO: 11998
  Synthetic

SEQ ID NO: 12000 - protein, 175 aa, Artificial Sequence
  Synthetic
SEVDEVIKRIEETNRRVEEMNKDAIRRVKESNKRVEERNKEVIERSKKLIDDVRRDRDRKKLREVLERIKDLHRRTIEDTRRVLKDNDELVRRTIEKTRRALERNKELIDRVLKRVPNVEERLRKVLKDSERTVKELEKRNRRVLEESDKEVKRLEKENRDVVDEIRERAKEIER

SEQ ID NO: 12001 - protein, 175 aa, Artificial Sequence; identical to SEQ ID NO: 12000
  Synthetic

SEQ ID NO: 12002 - protein, 175 aa, Artificial Sequence
  Synthetic
SEVDKVITELEKMLRRVKEENKRVIDESRRALEEVEKRNREVIERSDEMARRAAEDNDRRKIREILKTLKRLHEEAVEDTRRVLERLRRLHEKTVRDTKTVLDRLRELIEDVLRRVPNVEERLREVLERIARRVRELEERNKKVVKEIEERVRELERRNREVVKKIEEKVKRLET

SEQ ID NO: 12003 - protein, 175 aa, Artificial Sequence; identical to SEQ ID NO: 12002
  Synthetic

SEQ ID NO: 12004 - protein, 175 aa, Artificial Sequence
  Synthetic
DEVRKVIKELRDELRRVEELNKEVIDRSRKLVEDIARESKEVIERSRKLLDDVRKDRDREKLERVLDEIRRLHEDVLRKIREVVRTIEELHRDAVRKSKEVLKRLEELIRDVLRRVPNVREDLERALKEIEETIRRLEKRNRDVLKEIEDEARRLEEENRKVLKEARKIVEDIKT

SEQ ID NO: 12005 - protein, 175 aa, Artificial Sequence; identical to SEQ ID NO: 12004
  Synthetic

SEQ ID NO: 12006 - protein, 175 aa, Artificial Sequence
  Synthetic
SEVDDVTRKLERILEELTETSERVVRTSRRVAEELEKRSKEAVERSRKLAEEVARDRDREKLRRVLKEIEKLHRDTVKDLRDALKKIEDDHRRVVEKLKKALEELERLIRRVLREVPNVREKLERVLEEIRRRIEELSEKNRKVVKDIREIVRKLTERDEKVVREIKKIVDDIET

SEQ ID NO: 12007 - protein, 175 aa, Artificial Sequence; identical to SEQ ID NO: 12006
  Synthetic

SEQ ID NO: 12008 - protein, 175 aa, Artificial Sequence
  Synthetic
SEVDEVTREVEELIREVEKLSEDVIRTSKELAKRAEKLSREVIKRSEELIDEVRRDRDRRKLDEVVKRIEDLHRRVLEELERIVREIEKLHRETVKRLREVLERVRRLLEEVLERVPNVKKKLEDVLREIAKKVREIEERDRKVVEEIREILKRLEDENREVLKKIRRIAEEIRR

SEQ ID NO: 12009 - protein, 175 aa, Artificial Sequence; identical to SEQ ID NO: 12008
  Synthetic

SEQ ID NO: 12010 - protein, 175 aa, Artificial Sequence
  Synthetic
DEVRKVIKELEDRLREVEKKSKDAIDTSREMLKRVDDENKDVKRRAEEILKRVDEDRDRKKLRDVLRELERLVRETIKSSKEVLDRLRKLHEDTVRDLRRILKELKELIDDVLRRVPNVEEELRKLLEDIREKVERIVKRDEDVVREIEEEARRLADENRKVLEEIERIIRELER

SEQ ID NO: 12011 - protein, 175 aa, Artificial Sequence; identical to SEQ ID NO: 12010
  Synthetic

SEQ ID NO: 12012 - protein, 178 aa, Artificial Sequence
  Synthetic
REVDEVTRRIKELNDELERRVRRAKERIEELNKRVNREDEEIVDRVRKLNDELAKDNKRELVDEVLKETEKLIRRSEESVRRVLEETEKLIETLRREVEKVLRETERLIKEVVERRKDDEDVKRKLKEVVDESRRTVDEIRRELERVVEKSRKNIEEVKKHTREVLKRSEETARELKK

SEQ ID NO: 12013 - protein, 178 aa, Artificial Sequence; identical to SEQ ID NO: 12012
  Synthetic

SEQ ID NO: 12014 - protein, 178 aa, Artificial Sequence
  Synthetic
SEVDRVLEEIRKLNEDLNRRVDDATRKIRDLNRKLNEDVKKVTEDIKKLNEDLRKDNKKELVREVLKRTRDLIRELEKIVTDVLRTTEEVIKRLEREVEKVLRDTRELARDLLRKRKDDEEVKRKLEKLVRESERNVREVKKKLDEVRKESKTNADKVREELKRVVEESERTVRELEK

SEQ ID NO: 12015 - protein, 178 aa, Artificial Sequence; identical to SEQ ID NO: 12014
  Synthetic

SEQ ID NO: 12016 - protein, 178 aa, Artificial Sequence
  Synthetic
SEVDEVEKDIERLLEELRERVKRVTDEIRKLNKELNETDTDIVRKIRELLERLERDNKRELVREVLKRVKELADDSKRRVDKVLKDTERLIRELEKIVDEVEERVRRLVAEVLKRRKDDEEVKRRLEEVLRKVKRELDRIRDELRRVVEESETNVRDVRRHTEEVVKEVEDEVRRLEK

SEQ ID NO: 12017 - protein, 178 aa, Artificial Sequence; identical to SEQ ID NO: 12016
  Synthetic

SEQ ID NO: 12018 - protein, 178 aa, Artificial Sequence
  Synthetic
SEVEELERRIRELLRRVKRIDEEIVRRIRELNKELNRRDERIVETVRELVERVARDNKRELLDEVLKDVRRLAEESKRIVDEVLKDTERLARESKEILERVLKEVKELIEELLRRRKDLEEVKKRLEDVLRRVREEIERLKKHTDDVLRESEKNAEDVKKHTDDVVREIEERIRELKK

SEQ ID NO: 12019 - protein, 178 aa, Artificial Sequence; identical to SEQ ID NO: 12018
  Synthetic

SEQ ID NO: 12020 - protein, 178 aa, Artificial Sequence
  Synthetic
SEVEEVIKEIEKLNEDVNRIDKEIVKRIRDLNREVNERDKEIVKEIKRLVEEVRKDNKRELVDEALERVKKLAEDSKRIADDVLRRTEKLLRESKKILEDVNRTVRRLLEDLMRKRKDLEEVKDRLRKVLESSSDNVRRVTEHTDKVLEESRKNIEDVKKHTDEVVKEIEKEVRELKK

SEQ ID NO: 12021 - protein, 178 aa, Artificial Sequence; identical to SEQ ID NO: 12020
  Synthetic

SEQ ID NO: 12022 - protein, 178 aa, Artificial Sequence
  Synthetic
DEVKEVIRRAEKLNEKINDILRRVEEEIRRTLDEVRRRDEKIVKEIRDLMRELSEDNKRELVKKVLEEVERLARKSVEIIREVNKRNEDLIREVKRIADEVLKRTRDLVKDVRDKRKDDEEVKRELEEVVKESEKNIREVTDRLRKVLEESTKIVEELEEHTKRVVDEIRKRADELRR

SEQ ID NO: 12023 - protein, 178 aa, Artificial Sequence; identical to SEQ ID NO: 12022
  Synthetic

SEQ ID NO: 12024 - protein, 184 aa, Artificial Sequence
  Synthetic
SLEEEIDRVLDEIRRIIEEIKKHTTEVLEESKRNIEEVKKHTDEVNEKSRRDIEKIKREVRDKERVVELLDRVVKTSEDLARESKRILDEVLDTSRRLVEDSRRILDDVLRRVRELAEELKRVKDKEKVRKVIEEIKKIAEDVARRDKEMVDRSREINKKVNEEDKKIVEDSKRIIEDVKRKTD

SEQ ID NO: 12025 - protein, 184 aa, Artificial Sequence; identical to SEQ ID NO: 12024
  Synthetic

SEQ ID NO: 12026 - protein, 184 aa, Artificial Sequence
  Synthetic
SLEKEIKDALDRIKKDIEDSARRTKEVNDKSKEIIDRLKKHTDDVNDESRRRIKEIKDEVRDKKRVTELLEEVKERSKRLAEESKKILDEVVKKSRELAKRSKEILDEVLKRVAELAEELKRVSDKRLVKEVIDRLDEIVEDVKRRDEEIIRTSEKLLRDVARLDEEIAKRSRDLLRDVERKVK

SEQ ID NO: 12027 - protein, 184 aa, Artificial Sequence; identical to SEQ ID NO: 12026
  Synthetic

SEQ ID NO: 12028 - protein, 184 aa, Artificial Sequence
  Synthetic
SLEERLKKVLKEVDERIREIKKHTDKVNEESRDKIRKLKEELDRVNRESEEEARKIKSEVRDKERVVRTLKKAVEDSKKLIDDVKRILDEVVKRSEELVERSKRILDEVKRDVRRLIEELRRIEKDKDVRDVEEEIRKLLDEVRKLDEEMVERSKKLARTVERLVKEVIRESKEIIRKVKEETD

SEQ ID NO: 12029 - protein, 184 aa, Artificial Sequence; identical to SEQ ID NO: 12028
  Synthetic

SEQ ID NO: 12030 - protein, 184 aa, Artificial Sequence
  Synthetic
SLEEEIERVLRKVEKEIRKIKERLDEMLKEIRERIERSKRRTDKVNEDSRRRIEEIKRRVKDKKEVLERLDEVVRKSEELARRSKEILDRVLETVERLIRRVKEILDRVLDEVRKLAEELKRVDSKEDVKKVKKDIDKLLKEVREEVKEAEDRIRRIAEEVDKEDKRMIETSRRIIRKVDEDVR

SEQ ID NO: 12031 - protein, 184 aa, Artificial Sequence; identical to SEQ ID NO: 12030
  Synthetic

SEQ ID NO: 12032 - protein, 184 aa, Artificial Sequence
  Synthetic
RIEDKLRKVLEEVERIIREIRKRLEDANDDSRREIEESKEDTDRVLEEIRRRIEEIKREVRELEEVVRELDEVEKTVTKLAEDSKKRLDKVVEDSKDLVRRVEEILKEVLERVKKLIEEVKRISMDEDVERVLRKIKELLRRVEEEVERVIRESKKLLDEVRKEDEEIKKTLRDIVREVARKVK

SEQ ID NO: 12033 - protein, 184 aa, Artificial Sequence; identical to SEQ ID NO: 12032
  Synthetic

SEQ ID NO: 12034 - protein, 179 aa, Artificial Sequence
  Synthetic
SLEETVEKALKDSKDNIKRLKERVDRVLEESRRTIEELRDRARRVREEVKKRLDELRRRGLDEDELKKVEDRVDKVVRDVEKILEELIRRSEEVVREIRKLLKDVEEFSKEVVSRLRRVDKDAVKKLIDDVRKINKELNDTVEKLARDVEEINKEVARRVEKLVRELEKIDEDVTRREK

SEQ ID NO: 12035 - protein, 179 aa, Artificial Sequence; identical to SEQ ID NO: 12034
  Synthetic

SEQ ID NO: 12036 - protein, 179 aa, Artificial Sequence
  Synthetic
SLEEKVREVLKRSEDNIRKLEDESRKVLEDSERNLRKLKKEVDDAADRVRRKIKELRERGLDERELRKVERRVEDVVRRARELLDRVRKVSKEVHDRNKKLLDDLRRTSKEVADRLRRVDARIVDKLIREVEKINRDVNEKVRTSIEDLKRINEELNERVERLIREVERILKEVEDRAR

SEQ ID NO: 12037 - protein, 179 aa, Artificial Sequence; identical to SEQ ID NO: 12036
  Synthetic

SEQ ID NO: 12038 - protein, 179 aa, Artificial Sequence
  Synthetic
SLDERVERALEKSEENLRRLKKRSEEVLEEVKEAIKELKRRSREALEDVRRVLDELRKDGLDERVLEKLREDVERVHKRNEEILEEVERRVRRVHEDNKRLLDEVRDDSDKVVKRLRRVDAKVVEELIKRVEEINTRLNEKVKKSIDDVRRIIEEVRRRVEKTIRDVERIKEEVERRRR

SEQ ID NO: 12039 - protein, 179 aa, Artificial Sequence; identical to SEQ ID NO: 12038
  Synthetic

SEQ ID NO: 12040 - protein, 179 aa, Artificial Sequence
  Synthetic
RLEDEVRKMEKEVREEVKRLEDESRKVLEESRRNLDKLREESKRVLDTVRERIKDLRRRGLDERVLRELLKRVREVHERNRKLLDEVRRASEKVHEDNRRILEEVRKTVKDVVDKLRRVDAKVVKELIDRVRKILEDVEREVKKSIEEVKEINRRLNEEVKKTIEEVKEIVKEVTERAK

SEQ ID NO: 12041 - protein, 179 aa, Artificial Sequence; identical to SEQ ID NO: 12040
  Synthetic

SEQ ID NO: 12042 - protein, 179 aa, Artificial Sequence
  Synthetic
SLEDEVRDMDRKVDEALKRLRDESKKVHDDNKREIDKLRKESEDVHRENKETLDRLRERGLDERLLEEVRRRSEDLHRRNEKILREVIKVSKEIHDRNKELLDRLKERVRDVKSKLRRVDKDAVRELKRDVERIIKEVDELVKRSIEESRRITEEVARRVKETIDRSRKITKELRDRAD

SEQ ID NO: 12043 - protein, 179 aa, Artificial Sequence; identical to SEQ ID NO: 12042
  Synthetic

SEQ ID NO: 12044 - protein, 185 aa, Artificial Sequence
  Synthetic
SEIEELEERLERSTRDVEKKVRDTIRESERSTEEVARRVDESIKRLERVVEEVEERVRRIKDREEIKRLLDELRREAEEVHKTNKRLVEENNRVSEEVHRDNERLVDENDRVLEKALDDVRKRITDEEIRKRVEDVAKKVKEDTDKLRDDSRKVHERNEEESRRLEEKSERVLRRVEEILKEIER

SEQ ID NO: 12045 - protein, 185 aa, Artificial Sequence; identical to SEQ ID NO: 12044
  Synthetic

SEQ ID NO: 12046 - protein, 185 aa, Artificial Sequence
  Synthetic
SEVDRLITELRRSTKRVEEEVRRLIEDSKRSTREVAERVKESIRRVEKVVEEVKRRVDRIKDEEKIRELLRRLEEILKRAHDENEKLLEENDRVSDEVLERIEKLLKENEEVVRRVLKEVEDRITDEDIRRKIEEVVKEVKEETDRLREEAEKVVRENRKASEKLRRESEEVVERVKKKVDDTET

SEQ ID NO: 12047 - protein, 185 aa, Artificial Sequence; identical to SEQ ID NO: 12046
  Synthetic

SEQ ID NO: 12048 - protein, 185 aa, Artificial Sequence
  Synthetic
REVEEIIKELRKSTTDVAETVERLIKRSRESTKEVADRVKRLIDEVRRVVEDVERKVRRIKDREKIEKLLRELRKILREVLEEVEKLLRENEKVSRTVLKEIRRLLRENEKVVKEALDEVRKRVEDERIEKEIEDVVREMEERTKRLEKRAEEVNEENKRRSDELRKRIKKAVDEVEKRLDEIRN

SEQ ID NO: 12049 - protein, 185 aa, Artificial Sequence; identical to SEQ ID NO: 12048
  Synthetic

SEQ ID NO: 12050 - protein, 185 aa, Artificial Sequence
  Synthetic
SEVEDLIKKLEESTEEVDRRVKKLIEDSRRSTEDVDRKVKELIKDVRRVIREVEERVARIKDREKIEKLIRDLEEILRRALTEVERLLRENNRISEKVLEDVERLLRENERVVEEVLRRVEKLIKDDRIRETVERVFRKVERKTRELREEIREVDERNRRDSKRLRDEVERVARELEKKLKEIDE

SEQ ID NO: 12051 - protein, 185 aa, Artificial Sequence; identical to SEQ ID NO: 12050
  Synthetic

SEQ ID NO: 12052 - protein, 185 aa, Artificial Sequence
  Synthetic
EEVERLIRELEESTDRVAREVERLIRESRKSTEDVRRKVDKLLREVREAIKEVEERVRRTDDEREIEKLLKDLRKILEDVRREVKRLVEENNKVSEDVLREVERLLRENRRVVEEVLKRVAERVEDEEIKRKIDKVVEEVRRRTEELRERIERVNEENKEASERLERKLREMAKELDKKLKDIRR

SEQ ID NO: 12053 - protein, 185 aa, Artificial Sequence; identical to SEQ ID NO: 12052
  Synthetic

SEQ ID NO: 12054 - protein, 185 aa, Artificial Sequence
  Synthetic
KDVDELITRLEESTKRVAEEVKRLIEESRRSTERVAREVRRSIEEVKRVIREVEEKVRRIRERERIEELIRRLRKELKKVHDRNKKLLDENNKVSEDVLREIRKLLRENDEVVKEVLDRVRKRITDKDIERKIREVVEKVERDTRRLEEEAKKVNEENEKASRDLEKESKDAADTLEKKLRDIER

SEQ ID NO: 12055 - protein, 185 aa, Artificial Sequence; identical to SEQ ID NO: 12054
  Synthetic

SEQ ID NO: 12056 - protein, 185 aa, Artificial Sequence
  Synthetic
DEVEDLIRRLEESTKDVAKKVDDTIDESRKSTKDVAEAVKRSIDEVRRVVREVEERVRRIEDRKTIEELLDRLRKILEDAHRTNKRLVEENNKVSREVHETNKRLVTENEKVVRTVLREVEKKITDDRIRDEIRKVVERAKERTKELEDKSKEVNDRNRETSERLKKESEDVVREVKKELDRIRK

SEQ ID NO: 12057 - protein, 185 aa, Artificial Sequence; identical to SEQ ID NO: 12056
  Synthetic

SEQ ID NO: 12058 - protein, 185 aa, Artificial Sequence
  Synthetic
SEIDKVETEVKKLDKELEELVKRSSEKTEKLDRELEKLLRDVVREVEKLLKEIEDLVRRRKESEEVVRTAKELAERLIERLEDVLRRMKKLSEDLEDHNRRVAERIRRLSKELIDILREVLKRLDKKELAERIKKVARESEETVRRLEERLERDSERSRETLRRLAEAVRRVIEKVKEILERLRT

SEQ ID NO: 12059 - protein, 185 aa, Artificial Sequence; identical to SEQ ID NO: 12058
  Synthetic

SEQ ID NO: 12060 - protein, 179 aa, Artificial Sequence
  Synthetic
DKMEEVRRTVEKLLEDLNRLSEEVIRTSEKLLEELRRLSEEVERDTERLLKELEKMKRDGESEEKVERVLEEIERLHRETVERIRKVLKDIERLHRRVVTEAKKVVDELRKLAEEVRREGKASDEDIKRVLDEVKKILDDNREKNKRALDRVREEVKRLEDRNREVVRKVRKIVEDLRR

SEQ ID NO: 12061 - protein, 179 aa, Artificial Sequence; identical to SEQ ID NO: 12060
  Synthetic

SEQ ID NO: 12062 - protein, 183 aa, Artificial Sequence
  Synthetic
RVDERLDTVLKRVEETVRENKKKNDELLERSKENIDRLKKRLDDLLDKVRREAEKLKREVTKEEVKKIIDEVLKEIEDLLRTVKEELDRALERNREVVEETKRRIDRVLKEIEKLIRDVKRDRKEEVVKEVEERIKKLLKEVNDTSKDAERRLRETNERLNEIVKEVEKRIRELSEEVRKRVK

SEQ ID NO: 12063 - protein, 183 aa, Artificial Sequence; identical to SEQ ID NO: 12062
  Synthetic

SEQ ID NO: 12064 - protein, 183 aa, Artificial Sequence
  Synthetic
SVDERLDEVLERVKEDMDRNRRKNDESLREDEENVRRNKKETDESVKRVEERVRELKKRVKDERVKEFLDRVLEEIRKSAEEVKTIIDEVHKESEETVRRTKKIIEEVLRRIEELIRRVKKDRKEEVVKTVEEDIKRLLKEVNKVSDEAHKRNKELNERVNRVNKEAHKRNEDLLREAERKVR

SEQ ID NO: 12065 - protein, 183 aa, Artificial Sequence; identical to SEQ ID NO: 12064
  Synthetic

SEQ ID NO: 12066 - protein, 183 aa, Artificial Sequence
  Synthetic
DVKERLDKVLEEVKRDIERNKRRNDKLLKESKRIVEENKKKNEKSLEEVKRKADDLRTKVKDEEVKKIIKKVLDEIRESVERTKELADRILEENERLVRETKKILDEVLKEIRKLIEDVKKDRKKEVVEKVEREIERLREEVNRVSKKAEEDVERTNRELNRVSDEAHKTNERLLEKVERDVK

SEQ ID NO: 12067 - protein, 183 aa, Artificial Sequence; identical to SEQ ID NO: 12066
  Synthetic

SEQ ID NO: 12068 - protein, 169 aa, Artificial Sequence
  Synthetic
SSEDKARELVRTLEEALRELEREMRKVVEDSKKTLKELEERNRRLEEELEKVLERVRDEDAKRLVRKVLKESKEVLERSRELSKRADDELKRVLEEIKKRVEEVLKKVRDKPGDDRVIEELKELLERLRERVERVIKKVKDLNEELRRRNDKVAKDLKRLLKELEDRTR

SEQ ID NO: 12069 - protein, 169 aa, Artificial Sequence; identical to SEQ ID NO: 12068
  Synthetic

SEQ ID NO: 12070 - protein, 183 aa, Artificial Sequence
  Synthetic
SIEDEIRKVLTRLRRVLEEIKRSSKEVADELKRVLEEIKRSSEENNKEVEEVLKEIEKLPTDEELVRRVRKVAKEVKDHNERSTREVKKLVERLERILERSSREVEKTVRELEKELEKVLRDGGDREVREVIERLERMLEELERHNRDVERDLRRVLEEAKRHNEESLRRSKELLKKVRDEIE

SEQ ID NO: 12071 - protein, 183 aa, Artificial Sequence; identical to SEQ ID NO: 12070
  Synthetic

SEQ ID NO: 12072 - protein, 183 aa, Artificial Sequence
  Synthetic
SIEDEIRKLKEDIKRVLDKVRRDNERLKERLDKVLEDIRRSSEDNNRKLEEVLKRIRDKPVDERLVRKVEEAVKRLKEHNEDSTRRVEEVIRRLKEESEESVRKTEKVARDLERELDEVLTRGGEERVREVIEKLKETLERLKREDKEVADRAEKLLREAEEHNKRSLDESRRVLEELDEEIR

SEQ ID NO: 12073 - protein, 183 aa, Artificial Sequence; identical to SEQ ID NO: 12072
  Synthetic

SEQ ID NO: 12074 - protein, 183 aa, Artificial Sequence
  Synthetic
SIEDRVRRVLEELEEVLERIKDSSRRVVEEAEDVLRKLEEENRKLERDLERVLKEIEEEPVDETLVKEVRDLVERLKEISDESVKRSARLVEELKRRLEESSERVDRMAKELKRRLEEVLRRGGERELEEVEKRLREVLRRLEKHNEDVIRDLRRLLEEAADEDRRVIKTLRDVLRELKKRIK

SEQ ID NO: 12075 - protein, 183 aa, Artificial Sequence; identical to SEQ ID NO: 12074
  Synthetic

SEQ ID NO: 12076 - protein, 183 aa, Artificial Sequence
  Synthetic
KIEEKIRRLEEDLDRVLDEIRRNSERVTKEAEEVLERLKRENEKLKKRLEEVLEEIRRRPVDERLVEEVERAVRELKKKSDESVDRSARLVEELKKRLEESSRTVETLVRKLKEDLERVLREGGERRVDKVIEDLKRVLDEARRHNEDVVRKLKEALDKLREDDDRVRRDLEKKLRDLERRIE

SEQ ID NO: 12077 - protein, 183 aa, Artificial Sequence; identical to SEQ ID NO: 12076
  Synthetic

SEQ ID NO: 12078 - protein, 183 aa, Artificial Sequence
  Synthetic
SIREKIRELEERLEEVLRRIEENSERVLREAERVLKEIKDNSKRNNEKLERALEEIRKLPVEDELVRRVKELVERLKRHNKKSSEDVERVVRELKEELKRSSEEVKKAVDRLKEELEKVLRDGGEREVDRVIRKLEDVLRKLEEHNRRVVERLKRLLEELKKHNEDSLRKSEEVLRKLEEDAR

SEQ ID NO: 12079 - protein, 183 aa, Artificial Sequence; identical to SEQ ID NO: 12078
  Synthetic

SEQ ID NO: 12080 - protein, 183 aa, Artificial Sequence
  Synthetic
SIEERVRELMRDLERVLKEIREHSKRVIEEAKRVLEEIERNSERNNKELEEVLDEIRKRPVDETLVREVEEAVKKLKEHNKRSSDTVRDAVRKLVERLKESSDRATELVKDLKRKLEEVLRRGGEKELEEVERRLRKVLEDLRRNNKEVVDRLKEVLERLKEHNRRSLDESRKVLRELKERIR

SEQ ID NO: 12081 - protein, 183 aa, Artificial Sequence; identical to SEQ ID NO: 12080
  Synthetic

SEQ ID NO: 12082 - protein, 183 aa, Artificial Sequence
  Synthetic
SIEDRIRELEKRLEKVLREIEEHSKKVVREAEKVLREIEENSRRNNKRLEEVLDEIRKRPVDETLVREVEEAVRRLKKHNKDSSDTARKLVEELKKELKESSDRVRKVVEELKDRLRKVLEKGGEEDVRKVIRDLEDALRRLKEDNEDVVRRLKEVLKELRKHNKRSLDESEKVLRELRERIR

SEQ ID NO: 12083 - protein, 183 aa, Artificial Sequence; identical to SEQ ID NO: 12082
  Synthetic

SEQ ID NO: 12084 - protein, 183 aa, Artificial Sequence
  Synthetic
SIEDEVRKLAKDLDDVLREIEENSKRVLEKLDEMLERIREHSERVVERAKRVLDEIRKQPIDESLVRRVETVVRELKKRLRESTERVRTEVEKLKRLLEESSKEVKRVVEELKEELKDVLRRGGERELRTVIRKLKEVLDRLREHNKRVVEELEEALKELEKDNRKVVEDLERMLEELKREVN

SEQ ID NO: 12085 - protein, 183 aa, Artificial Sequence; identical to SEQ ID NO: 12084
  Synthetic

SEQ ID NO: 12086 - protein, 183 aa, Artificial Sequence
  Synthetic
SIEEEIEKVKKRLEDVLREIKKHSEEVKKKAEDVLRKIEKHSRDNNRKAEEVLKDIARLPVDERDLKRVAEVVDRLKKHNKKSTDDARKLVKELLERLDRSSETAERVVRRLKEKLDKVLKDGGEEEVRKVIEELEELLERLRRNNEEVVRDLERVLEELKRDNEKSVEDSERLLTELKREIE

SEQ ID NO: 12087 - protein, 183 aa, Artificial Sequence; identical to SEQ ID NO: 12086
  Synthetic

SEQ ID NO: 12088 - protein, 184 aa, Artificial Sequence
  Synthetic
SVKEELDDLERKVDEDVRRIRRELDEVLKESRENVKRSKDHLDEVLRRVEEAVKRLIRERGETSELAELVREVLKRVKELLRRVVEITKDVLRRSEELIRELKKELDDVRRRIKELVDRVAEDPDKEKVDRAKKEIEDLLREVRKRVEDVAREIKRLNEDVNRINDKVTREIEKLLEDVDRKVK

SEQ ID NO: 12089 - protein, 184 aa, Artificial Sequence; identical to SEQ ID NO: 12088
  Synthetic

SEQ ID NO: 12090 - protein, 184 aa, Artificial Sequence
  Synthetic
SVEDKLRELEKRVRDVHRKNEEDLDRLLRKSHEMHKRNEDELRKVLEEVRDAVRKLLKEKGETSELAEELRRVLEEVERVIREALKISEEVNRRNEELLKRLKEESRRVLEEVKRMLEKVRDKPDDEEVERVIKRIDDLLKEVHKILREVIRRIEKSLEEVHKRVRDLVREIKELLKEVDRKAK

SEQ ID NO: 12091 - protein, 184 aa, Artificial Sequence; identical to SEQ ID NO: 12090
  Synthetic

SEQ ID NO: 12092 - protein, 182 aa, Artificial Sequence
  Synthetic
SLEDKVRELERKSRENIKRNEEELRRAKRESEENIKRNEEELKRNKERSDRMIEKIRRETDDERVKKILKDLARRSEELLRRSKEILEELRELSERIVKESTDILRELLELVKEVAKRLRRVDKDVVERLREALEDANRRVNERNRELIKRLKEANKKVNEENEDLLRESEEILRRVEEEVR

SEQ ID NO: 12093 - protein, 182 aa, Artificial Sequence; identical to SEQ ID NO: 12092
  Synthetic

SEQ ID NO: 12094 - protein, 182 aa, Artificial Sequence
  Synthetic
SIEELVKDAKRRSKENADRNREKLRKVEDDSRRNIEENERRLEENEKRSREVIKELADRTDEERVRELLRRLLELSKRIADESRKILEDLLRRVKEVIRESERIIREVEEVVKEVLTRLSRVSEDVVEKLIRELEEINREVNKRNDDLIRELREINKKVNEENKRLMKESDDILKEVRERVR

SEQ ID NO: 12095 - protein, 182 aa, Artificial Sequence; identical to SEQ ID NO: 12094
  Synthetic

SEQ ID NO: 12096 - protein, 182 aa, Artificial Sequence
  Synthetic
SIEDLVRELKKKVDEVAEDLRRKVREALERSRENIDRLKKHSEENLRRSEEVVDKLRKETREEEVKDILRRVLELSKRIVEESKEILDRVLELSKKVVDDIEEIIRRVEETVKEVLTRLSRVDDKVVKKLIKEVDDILREVTKLVEKLIRELEDINRKVNERNRRLAEESRKILDEVEKRVR

SEQ ID NO: 12097 - protein, 182 aa, Artificial Sequence; identical to SEQ ID NO: 12096
  Synthetic

SEQ ID NO: 12098 - protein, 182 aa, Artificial Sequence
  Synthetic
SLDEKVEELRREVDEAIKDIKEKVKRANEESERNIRELEERVKRNLEKSKKAIEELARRVDDERVEKILREVLKRSKEIVDTIRKILEDVKRFSDKVVEEIDEILRELKRRVEEVLRRLRRVDEKVVEKLRKEVKEVLKEVEDRVRKLIREVERINEEVNRRVKELLEESEKILDDVDKRVK

SEQ ID NO: 12099 - protein, 182 aa, Artificial Sequence; identical to SEQ ID NO: 12098
  Synthetic

SEQ ID NO: 12100 - protein, 188 aa, Artificial Sequence
  Synthetic
EVEERVKELEKEVEEVLKESEDHVRKSEEDLRRALEESRKHIEDLERKLKKVLEELERKVKEEDMKREVRRALEEIDRVIKKVKRDSERLVKRVEKSIEDTRKVVEDANREVKRIVDEVKEVVRRNDKSKDLLKKLEEEIRKIITENRKLNRDLHRENERIIRDVRRENKRLADELEEIIKEVRERLK

SEQ ID NO: 12101 - protein, 188 aa, Artificial Sequence; identical to SEQ ID NO: 12100
  Synthetic

SEQ ID NO: 12102 - protein, 188 aa, Artificial Sequence
  Synthetic
SVEEKVEELEKEVRKALEDSKRHVDESEKRARDLARRSRELVRRWEEEVEKIVRELETRVKEDEMREKVKRIIKRIRDVVKKLRDLSEEVIKELERSVEESRKAVKDLNDRLREVIKEVKKVVRDKRDMEDLLRKLADEIRRILEDNRDLNRRLNEKNKEVLDRLEELNKTLADELRDIIRKLEKELE

SEQ ID NO: 12103 - protein, 188 aa, Artificial Sequence; identical to SEQ ID NO: 12102
  Synthetic

SEQ ID NO: 12104 - protein, 182 aa, Artificial Sequence
  Synthetic
KELEDVVRKIEEDLRRLEESNEKVHRENEEIIRRVDETNKKVMKEIKEMEKKVRDLVRERKEKEEVVREIEKLAREVLEKLDKVNKENEELARESVKELRRVLKENEDRVRELAKELRRVAREKNRGGEVERVIERLEKVVRDSAANVERSIRELERVVEESSKHVEDVKRELKKVVDEIRT

SEQ ID NO: 12105 - protein, 182 aa, Artificial Sequence; identical to SEQ ID NO: 12104
  Synthetic

SEQ ID NO: 12106 - protein, 182 aa, Artificial Sequence
  Synthetic
SDLDRVREEAERVVETVRRSNKEVKKKLDRELKRLRDSNKDVVDKIKRVLEKLRELIKRRKEKEEVVDTVRKLVEEVRRKLDEVLKRNRELIRRLLEELDKVNKRNKELAEEVVRKLEKVARERNVGGEIEEVRDKLRKVVEESSKHAEEVKRDLERVVEESTRNVDRVREDLKRVLDEIET

SEQ ID NO: 12107 - protein, 182 aa, Artificial Sequence; identical to SEQ ID NO: 12106
  Synthetic

SEQ ID NO: 12108 - protein, 182 aa, Artificial Sequence
  Synthetic
SLRERIEELKEELRRVLEELERRHRETEKKLEEVLKELKRRHEELVRRLRKALKEIKDKLKDKDVVRKVEKLAKELEEENKRVVETVAELIERLKDLNRRVVEEVRKLIKEIEDKLEEVKELDEEAIKDVERKVKKLLKELRDLSEKVRKESDDLLRRLRRESERVERETRKLEKELRDEVR

SEQ ID NO: 12109 - protein, 182 aa, Artificial Sequence; identical to SEQ ID NO: 12108
  Synthetic

SEQ ID NO: 12110 - protein, 179 aa, Artificial Sequence
  Synthetic
SKADEVRKKVDDINKRLRETTDRVAEETKKLIEELKKSAEEVKREVDKINKDLRKLAEDGRSEEEVKRLSERTEKLLEENNKRSEEVVRRIRELHERDLTTVRRLSEETKRLLKEVADEGKISEKDVERLTRKSEKVVREIEKKNEELKRELTEVLKDDERRNKELVEDSRRVLEEIRT

SEQ ID NO: 12111 - protein, 179 aa, Artificial Sequence; identical to SEQ ID NO: 12110
  Synthetic

SEQ ID NO: 12112 - protein, 179 aa, Artificial Sequence
  Synthetic
DKARDVARKVEELLERLRELSERVSRTSEDLNRKLKKISEDVSRTSKKLLDELRRAKEKGEDRKRVEEVVRRIDELNKRAVEIVRKLSRDTEKLNEDAVRDVRRVVEEIKKLLEDVARDGKIREEDVRRLKERVKKVMEELERRHERDKEKSRRVVEKLERDHREDLKRVKKVLEEITK

SEQ ID NO: 12113 - protein, 179 aa, Artificial Sequence; identical to SEQ ID NO: 12112
  Synthetic

SEQ ID NO: 12114 - protein, 179 aa, Artificial Sequence
  Synthetic
SKADKVEEEVKELLKRAKALSDRVSEESRRLLKELRDSARRVEEEVKRLEEELRKLKEDGKSEEEVRKVVEEIRELLTRNNKTSEEVVRRIRKLNDDAVKEVTEVVKEIEKLLREVAREGKISEEKVRRVLREVREMLKDLEKKHRDDIKRVTEVLKEDEEKNRDLMRKVDKFLEDIRK

SEQ ID NO: 12115 - protein, 179 aa, Artificial Sequence; identical to SEQ ID NO: 12114
  Synthetic

SEQ ID NO: 12116 - protein, 179 aa, Artificial Sequence
  Synthetic
SKAEEVEELVKKLLAEVKKSLDDVRRTVEKLLREVRKSLREVEETVKRLLKRLKDLKDDGQDERAVRRVVEEIKELLDRNNEDSKRVVKEIRKLLDENDKTSKRVVEEIKRLLDEVRKEGKISEEKVEKLERDVRRALERDTRENKKLEDRVETALREDKKRNDDLREDVKRVLEEIRT

SEQ ID NO: 12117 - protein, 179 aa, Artificial Sequence; identical to SEQ ID NO: 12116
  Synthetic

SEQ ID NO: 12118 - protein, 183 aa, Artificial Sequence
  Synthetic
DELEELIRRIEKLIRDSRKITDDVRKEIEKTIRESREINKEVHERNRKLLEEITEVVKRDGGEAEEVVKIVRDVLRRIKESNEEVLRLTEEVHKTNERLLREVLRVTREVLKEIKKRVERVKDRGAREEDLRRVDDRVRRVVEESEERLRRVYEESRKVVEESRKHLKEDLDRVKRTVEEIER

SEQ ID NO: 12119 - protein, 183 aa, Artificial Sequence; identical to SEQ ID NO: 12118
  Synthetic

SEQ ID NO: 12120 - protein, 183 aa, Artificial Sequence
  Synthetic
SELERVEEEIKKLIRTSREINKEVAKRIEETIKESRDINKEVVDRIRELIERLREVVKRDGGETRRVVEIADEVLKTIRDLLRRVKEITDKLHEDNERLLRRVEEVSKKVLDDIKRLIEDLRRRGVDEKELKRVEDEVRKVVEESKDHLRKVYEKSKKVVEESKEHLDRVLREVEKEIEEIRR

SEQ ID NO: 12121 - protein, 183 aa, Artificial Sequence; identical to SEQ ID NO: 12120
  Synthetic

SEQ ID NO: 12122 - protein, 183 aa, Artificial Sequence
  Synthetic
SELERVEEEIKRLIDESERINRKVVKEIEDTIRTSEEINREAHRRNRELIKRVEDVVRTKGGEDEEVVRIVRKVLEEVKKSNTDVKRVTKTVHDDNRRLLEEVKRVSEEVLKTIKRLVEDLRRKGVDEKELRRVEEEVRKVVRDSERHLDEVYKRSKEAVDRSKKHLDKDVEEIDRVVKEIER

SEQ ID NO: 12123 - protein, 183 aa, Artificial Sequence; identical to SEQ ID NO: 12122
  Synthetic

SEQ ID NO: 12124 - protein, 183 aa, Artificial Sequence
  Synthetic
RELEEVKKEIDRLIREVEEVNKDVVRKIKETIRRSREINKRVVDEIRRLIKELDDVVKTKGGESEEVVRIADEILERIKKLIEEVKEVTRRIHETNKRLLEEVKELTDEVLKTIRELVEDARRRGVDERELRKVLEKVERVVKKSRDHLDRVYEDSERVVRESEKHLDEVLERVREEIERIRK

SEQ ID NO: 12125 - protein, 183 aa, Artificial Sequence; identical to SEQ ID NO: 12124
  Synthetic

SEQ ID NO: 12126 - protein, 183 aa, Artificial Sequence
  Synthetic
RELEEAEKTIEKLIKESRDINEKVARDIDKTIREIREEMKRVEEEIRDLIRRIREVVKRDGGESERVVREVRRILEEIKKLLEELEKRVEEIHERNKRLLDTVLRVSEKVVEDIRRLVEEVRRRGADERKLREVTKRVDKVLEESRRHLEEVYRKSKEVVDEIRKRLREVLKRVREDVERIER

SEQ ID NO: 12127 - protein, 183 aa, Artificial Sequence; identical to SEQ ID NO: 12126
  Synthetic

SEQ ID NO: 12128 - protein, 183 aa, Artificial Sequence
  Synthetic
SELDEVAKRIKELIKESRRINEEVERRIKKTIDEVRKINKEAAKTVDDLIKTIRDVVRRKGGETKEVREIVDEILERIRELVKEVKRFTDEVHERNRELLRRVVEVSEEILRRIEKLLREARERGVDEKKLRDLEEEVRRVVEESKDHLRKVYERSRKVVEESRKHLDEVLTRVDKVVKDIRT

SEQ ID NO: 12129 - protein, 183 aa, Artificial Sequence; identical to SEQ ID NO: 12128
  Synthetic

SEQ ID NO: 12130 - protein, 185 aa, Artificial Sequence
  Synthetic
SELEEAEKKIERLIEEVRKMNKTVHEENERLIEDLRRVVKEAHERNKRLIEELEDVVRKISDKETVTRIVEEVVRRVRKTVEDVRRIVDEVLKKVKDTVDRVKRITDEMLRKVKELVDDVRRKVDDKDVEKKLKDVLDKVRKVVEESRRHLEESLDKVRRVAEEIRKRLKESKDRVDEAAKEIRR

SEQ ID NO: 12131 - protein, 185 aa, Artificial Sequence; identical to SEQ ID NO: 12130
  Synthetic

SEQ ID NO: 12132 - protein, 185 aa, Artificial Sequence
  Synthetic
DELEEAEKRIKELIDRLEEFNEEVHRRNEKLIRELREVLKRVEEEIRRLIKELRDEVRKISDKDTVEDIVRKVLETVKELIKEVKKIVDDVLREVRKTVRKVKEITDDMLRRVRKLIEEVRKRTRDKRVEERLERVLREVEEVVKRSRKHLEDSLREVEKAVKEIRDRLDEVLRRVEKAVEEIRT

SEQ ID NO: 12133 - protein, 185 aa, Artificial Sequence; identical to SEQ ID NO: 12132
  Synthetic

SEQ ID NO: 12134 - protein, 185 aa, Artificial Sequence
  Synthetic
SELEDAERKVKELIDRLREVNRKVHEDNKRLIDELRDVNRKVAEEVRRLIEELKEVARRVDDKETVVRIVDEVLKRVEELIEKVKRISDRVLEEVKRTVDEVKRITDKVLEDVKRLIDDVKRKTRDKRVRDRLKEVEDRVRKVVEDSRRHLEKSLREVEEVIRESREHLEEVLRRVKEEADKIRK

SEQ ID NO: 12135 - protein, 185 aa, Artificial Sequence; identical to SEQ ID NO: 12134
  Synthetic

SEQ ID NO: 12136 - protein, 185 aa, Artificial Sequence
  Synthetic
SELEKVREDIKRLIEDLRRANDRVRRESERLNRELREVNKRVHDDNRRLIEELRRLVKDIKDKETVRRIVDEVLKEVRKTVETVKRISKEVLERSRKLIEEVKEITKRALEEVEELVRDVERKTRDERVRDELRKLLRTVEKVVEESKKHLKEVLDRSREVVEESKTHLEKSLTDVEKVVREIRT

SEQ ID NO: 12137 - protein, 185 aa, Artificial Sequence; identical to SEQ ID NO: 12136
  Synthetic

SEQ ID NO: 12138 - protein, 185 aa, Artificial Sequence
  Synthetic
STLDEAVKRIDELIKRLREVNEEVARRSKRLNDELKKVNEDVARKIEELIRRLRDVVRKISDKETVDRIVDKALEDVKKLIEDVKRISDKVLEDSKRLIEEVKRITDRVLEEVERLIREVKKETRDKRVEEELERVLRKVEKVVKESRDHLEEVLRRSEDMARRSREHLEELLKRVEKVVREIRT

SEQ ID NO: 12139 - protein, 185 aa, Artificial Sequence; identical to SEQ ID NO: 12138
  Synthetic

SEQ ID NO: 12140 - protein, 185 aa, Artificial Sequence
  Synthetic
SELEEAIRRIEKLIRELREVNKRVAEEVKKSNEESKEVNKRVKDDVKELIERLRDIVKKVKDKDTVEEIVKEVLKRVKELIDEVRRISDEDLKTSKRLIDEVKRITDEMLERVRRLVEDVRRKTRDKDVEDKLREVLRRVEKVAEESRRHLEKVARESEEVVKRSRKHLEEVEREVKKVIDEIRK

SEQ ID NO: 12141 - protein, 185 aa, Artificial Sequence; identical to SEQ ID NO: 12140
  Synthetic

SEQ ID NO: 12142 - protein, 185 aa, Artificial Sequence
  Synthetic
RTLEEVEKEVEKLIEDLRRVNREVAERIKKSNEDSKRVVERVEDEIRRLIEELKDMVRKVSDKETVVRIVDEALERVEELIRRVKKIVDDDLRRSKELIDRVKEITDRMLETVKRLIDEVRAETRDERVDKRLRDVLRKVKKVAEESRKHLEELAERSKEVVERIRRRLEEVLKRVREEAEKIRK

SEQ ID NO: 12143 - protein, 185 aa, Artificial Sequence; identical to SEQ ID NO: 12142
  Synthetic

SEQ ID NO: 12144 - protein, 185 aa, Artificial Sequence
  Synthetic
SELEDAERRIERLIRELRKANEEVARRIEKSNEDSRRVNKKVAEEIERLIKELRDVTKDVDDKETVKRIVDEMLERVKKLITEVKEISDRDLEESRKLIREVEKISEDVLDTVRKLVEDVRRKTRDKRVEEELKRVLDEVKRVIEESKERLKKWLRDSERVVEESRRHLEELRKRVEKAVREIRT

SEQ ID NO: 12145 - protein, 185 aa, Artificial Sequence; identical to SEQ ID NO: 12144
  Synthetic

SEQ ID NO: 12146 - protein, 184 aa, Artificial Sequence
  Synthetic
RVEDEVRKMREKSEKVDREIREAVRRSLTRIKEVVDEIRDEVRRSEDKVKKEIDRLRKEGADEKALKELLDRVKRSVEEVERVVEEVLRRVEESARDVERVVTENHRISKELVEDVRRKVSREEVDKLLDEVRREADESNTRLRERVKEVNKRNEEVIEELRKRVEEVHRTNEDLIRELRKKTT

SEQ ID NO: 12147 - protein, 184 aa, Artificial Sequence; identical to SEQ ID NO: 12146
  Synthetic

SEQ ID NO: 12148 - protein, 178 aa, Artificial Sequence
  Synthetic
REEEELERVKRRSEKVDEEIKKRLREVAEEVKRSNEEVKKRLEEVLRDSKRKLDELREEGADEKAVEENERTVRTVARRVEKVVRENEKTLREAERAVEEVLDRNRKTVEDVERLLKRREKDVRELIRELEESNKRVKDVLRKLIEEVKKSDDELREIVKRLVEEVERSNKELEDRVR

SEQ ID NO: 12149 - protein, 178 aa, Artificial Sequence; identical to SEQ ID NO: 12148
  Synthetic

SEQ ID NO: 12150 - protein, 178 aa, Artificial Sequence
  Synthetic
REEERLKKLKEDSDRVDREIERKAEKVLEESEEVDRDIERKLREVERKSREVLEELKKRGADKDAVKRNEETVRRVVEEVRKVLDENTRSVEKVLEEAKRVVEENKKTVDRVDKVVRRRDKDLEELRKEVEKSNTDLEKIIEDLIRRLKKSNEDVRRTVTELVKEVDRSNKKLEDEVR

SEQ ID NO: 12151 - protein, 178 aa, Artificial Sequence; identical to SEQ ID NO: 12150
  Synthetic

SEQ ID NO: 12152 - protein, 178 aa, Artificial Sequence
  Synthetic
REEEELEKLRERSERVDDEIRKRLREALERSREVDEELRRRAEESKKESDEVIKDLARRGADRKALEENRETVRESLERMRRVVDENTKSVEDVFKAVEDVLRRNKRTVDEVRKVVERREKDLDELRREVEKSNEDVRRFLEKLVRDLEESNRRVRERIKRLHEENKKSNDELRKRTK

SEQ ID NO: 12153 - protein, 178 aa, Artificial Sequence; identical to SEQ ID NO: 12152
  Synthetic

SEQ ID NO: 12154 - protein, 181 aa, Artificial Sequence
  Synthetic
SELEELKKKSKKLNDDIERVVEEVLKRSEDINERVKKEVKDVIDRNTDVLRRVKRDVEREDKSRELIRRLIEEIKKTTKELEDRVRELVKESEESVRRIEKLIRELIKESEKVVEEVKRTVSKGKEEAVRKVEKENRESVEKLKKAVKEVRDRNRKVIEELKDLVRRSRDKSKKVVDELRK

SEQ ID NO: 12155 - protein, 181 aa, Artificial Sequence; identical to SEQ ID NO: 12154
  Synthetic

SEQ ID NO: 12156 - protein, 181 aa, Artificial Sequence
  Synthetic
REVDKARKDVDDILKRVTEAVDRMDRDNERVLREVEETIRKLEEDSRRINKDIEDAVRKEDKSRELIKKLIEESKRSVDELRKVITRLERRIERTTKELKKLVEKLIRELKKVVEDAIRKVSKGSRKDVEDVRRKVEEVVRRMEKRLRESEKKSRDVVRKLRKVIEDVERDNDRVVKELEK

SEQ ID NO: 12157 - protein, 181 aa, Artificial Sequence; identical to SEQ ID NO: 12156
  Synthetic

SEQ ID NO: 12158 - protein, 181 aa, Artificial Sequence
  Synthetic
SELEEMRRRIERLAEEVRTTVEEVVRRSEELNKEVEKAVRKVVDENRRVLEEVKEEVRKEKDSRELIERLIRRIEETTKKLEDLVRKLVKELRDSVEEIRKLIEDLIRRLKKVVREAKETVSKGKKEEVKRVEERVERVVEELRRLVEEVRKRNEDSIEKLKDLVRRSKEESERVVKELED

SEQ ID NO: 12159 - protein, 181 aa, Artificial Sequence; identical to SEQ ID NO: 12158
  Synthetic

SEQ ID NO: 12160 - protein, 181 aa, Artificial Sequence
  Synthetic
SDLERVRKESEDLNRRIKTEVRRVLEELKELLKRIKEEVEELVRRNEEVLKRVREEVTKRREARELIRDLIKKIRDTTEELRRVVERLVEEIKKVLRDLKKLIEDLIRESKKVVREILERVSKGKEEAVRKVKEDNDRSVEELKELVKDVERKLREAIKELEDLIRRSEEKSREVVERLRR

SEQ ID NO: 12161 - protein, 181 aa, Artificial Sequence; identical to SEQ ID NO: 12160
  Synthetic

SEQ ID NO: 12162 - protein, 183 aa, Artificial Sequence
  Synthetic
SLEEEVRRVKKELRRVLEKSTKLIEEVTRELETVLRESRDRVRRAKEELKEAVREVRRDVGEGEKLRDAERVVEDLLRELDDSLRKTEEMVKELKKKLDKSNKTTADLVRELLKRLDKVLKDGGEEEVRKVVEDVERVLRELEKHDRDVAEEVRRVLDELRKHDEDVRRKLRKVLEELKEKIK

SEQ ID NO: 12163 - protein, 183 aa, Artificial Sequence; identical to SEQ ID NO: 12162
  Synthetic

SEQ ID NO: 12164 - protein, 183 aa, Artificial Sequence
  Synthetic
SIEDRVRRVEKELREVERKSTETVKRVEEELEEVVRRSRELVERVKERLKKMVEEVKRDTGEGEKLKRAEEMVRRLLRELEESNKKTKTLVDRLLEELRDSNKKTRDLVRELLKKARDVLRRGGEKELEDVERDVRRVLKEAEDNDRRVVERVRRVLKEAEKHDRDVVRRVDEVLKRLKEEIR

SEQ ID NO: 12165 - protein, 183 aa, Artificial Sequence; identical to SEQ ID NO: 12164
  Synthetic

SEQ ID NO: 12166 - protein, 183 aa, Artificial Sequence
  Synthetic
SIEEAVERVAKRLEEALRRSTEEVKRVKEETRESVERSRREVEKVEKELREVVERVRRERGEGEDLKRAEDVVRELLKLLRESLKRSEELARDSVRKLDKSNTDTERLVRELLKRARDVLREGGDDRLRKVVEELETVLDELRKNDRRVIEEVRRINDELRRRDEEVIKRVRDMLKKLTEEIK

SEQ ID NO: 12167 - protein, 183 aa, Artificial Sequence; identical to SEQ ID NO: 12166
  Synthetic

SEQ ID NO: 12168 - protein, 179 aa, Artificial Sequence
  Synthetic
SLEDKLRENKRRSEAVVEEAERRLRKNEEDSRKVVRELEDKLRRLREESKEMADRLRRKGADERVVRKVNKDSEDIIRELERLVREVERVSEELIRRIEEIVTRVLRVSEEILRRLKRVDDKVVEKLLKESKEILDRARETVKRILDDSERILRELRRRVEKLIKESRDILRKVDEDER

SEQ ID NO: 12169 - protein, 179 aa, Artificial Sequence; identical to SEQ ID NO: 12168
  Synthetic

SEQ ID NO: 12170 - protein, 181 aa, Artificial Sequence
  Synthetic
KAEEILEDIKRAVEEALRKLEESVRRNKERIREAVERLRETVKEAKERVDEVKRELEEKGVDRSLIRRVEEVVKRVLDINRRLIEEVEDVVKKSEEINADLIREVRTVVTDVERIIRENGELEEVLRKVREDLERIIRRVEEESKKSHKDSEDVLRRVEERSKKSLEELEDIIKKVKEEAD

SEQ ID NO: 12171 - protein, 181 aa, Artificial Sequence; identical to SEQ ID NO: 12170
  Synthetic

SEQ ID NO: 12172 - protein, 181 aa, Artificial Sequence
  Synthetic
DMEKIVRDVEDRVREVEDRLRRIAERNKREIERVVEELKKTVKEIEDKVREVVKRLEEKGIDESLRERVEKVVRDVVRENEELIKEVEDAVRESLKIVKDLIDEVRRVVAEVERIIRENGELEEVLRKVVTDLERILRRVLEDAKRVHEESKRRLDDVRRRSEDSVRRLEEELKRVEEEVD

SEQ ID NO: 12173 - protein, 181 aa, Artificial Sequence; identical to SEQ ID NO: 12172
  Synthetic

SEQ ID NO: 12174 - protein, 181 aa, Artificial Sequence
  Synthetic
DAEKILEDIKREVDEVLKRLRDIIRRNEEEIRRAVEDLKRIADEDREAIKRVIDELRKKGVPEELLKEVKDVVDESLRRIEKLIEDVKRAVAESVRRAEKLIRDVERVVKRVEDIIRKNGEAEEALRKVVEELRKILRDVTEVAKKVHRDSEEVLKKVREDVRKVHEDSKRVLDKVDKDAN

SEQ ID NO: 12175 - protein, 181 aa, Artificial Sequence; identical to SEQ ID NO: 12174
  Synthetic

SEQ ID NO: 12176 - protein, 176 aa, Artificial Sequence
  Synthetic
SRLEEVLRRHEELNERVERTVKKVHDDSKELIDRIRKDVEKVVRELEKVIDEVEKNSRDKDLVREMIKRIEDVLRRLEDRVRKLAEKIDRVLEESRRLVEELAKRSRESLKRLVDTIGKESEKVEEIERHARKVERRLEEIVDRNRKSVDKAKKELEKIVRDVRRRVEEVVDRLRK

SEQ ID NO: 12177 - protein, 176 aa, Artificial Sequence; identical to SEQ ID NO: 12176
  Synthetic

SEQ ID NO: 12178 - protein, 176 aa, Artificial Sequence
  Synthetic
DEVRRVLEELRRLLDEVRERVRRVVEEHKRLNDRIRREVERAHEENKRVDDDLRRKVRTRELVKEVIERSKEVLERTEKLVRDLARDSDRSVEEARKRVEELMREIDDVLEKLVRTIGKDSKDVKEVKKEVERVKEELRRLVEELRKHAEKVKEELKRIVDRDRETNERTVEELKK

SEQ ID NO: 12179 - protein, 176 aa, Artificial Sequence; identical to SEQ ID NO: 12178
  Synthetic

SEQ ID NO: 12180 - protein, 176 aa, Artificial Sequence
  Synthetic
SEAEDVLRKLERLLEEVRERVADAHRRSKELLDRVDKEVKRVNEENRKLDDDIRKKVRDKDLVRKAIEDSKTVLEKTKRLVEDLMRKIDRVLEESAKVVEKLREEIEKVLRELLETVGEDNDEARKVREKVKKVEEELRRIVEEDRKEVEKVKRKLEKDVREDEKENRKTVRELEQ

SEQ ID NO: 12181 - protein, 176 aa, Artificial Sequence; identical to SEQ ID NO: 12180
  Synthetic

SEQ ID NO: 12182 - protein, 185 aa, Artificial Sequence
  Synthetic
TLEELLEEIRRKVEEVLKKLEDLLRRDHEEVKKVEEELEEINKRSEDRVRKAVRRLERDAKDDKETVKRVKKKLEEVVRKDHDVVRDIKRRLKESNDKSERVMREIKKRLKEVLDEVKKVVDDGVGEEAIRKVLRKLEEEAKRLEKRIEEVLKESKDRIDELRKRIEESHKDLERIIEELERRIK

SEQ ID NO: 12183 - protein, 185 aa, Artificial Sequence; identical to SEQ ID NO: 12182
  Synthetic

SEQ ID NO: 12184 - protein, 185 aa, Artificial Sequence
  Synthetic
RLEELLERIRKRVEEVKRESERLLKEDHDRVEEAKKRSEDINRRSKEEVDRMLRELETKAKDDEKVVREVKELLKRVVEKDHDLSRRSVELLDTSNKKSKDLSEESKKELDEAVKEVETIVRNNVGEEAIRRVLKKLEEIAKRLLDENRRVLEESKKIIDKLEEDNRRSHRELKRILDELRKRIK

SEQ ID NO: 12185 - protein, 185 aa, Artificial Sequence; identical to SEQ ID NO: 12184
  Synthetic

SEQ ID NO: 12186 - protein, 181 aa, Artificial Sequence
  Synthetic
KEAEDLEKKVEDILRRVRELLEELHRRSEKILKDVKDRSRDLLRRVREILKRVEEKKERVREDELDKILKEVTERVKRVLEESEELLRRVEKVVKDINKRAEEILERVRKVVEDVLDDMRKKGVDERLVREVEKKLRTVEEEVRRIVKENKERLDEAREDVKRSNKTIRDELERARERIET

SEQ ID NO: 12187 - protein, 181 aa, Artificial Sequence; identical to SEQ ID NO: 12186
  Synthetic

SEQ ID NO: 12188 - protein, 181 aa, Artificial Sequence
  Synthetic
SEAEDLTRRVREILKRVEDLSKKLNDDTKKILDELRELSKRLMEEVKKILRRVEEKKERVSEDELRRILEDVRRRVEEVVKTSERLLRRVEKASKDSVETSRRLLERLREFVRRVLEEARRRGVDKRLVDTVREELERVRKKVEDSDRRNEEELRKVKEEARRSNERIRELLKTVEDRIRT

SEQ ID NO: 12189 - protein, 181 aa, Artificial Sequence; identical to SEQ ID NO: 12188
  Synthetic

SEQ ID NO: 12190 - protein, 181 aa, Artificial Sequence
  Synthetic
DEVRKLVREVEDILRRVREKSERLVRLVEEILRRVLEESRRLLEETREILERVEEKKERVSEKELKEILEEVARVSEKTVRDSERLLDDVRRKVEEVLERSRRLLDEVRKTVEKVLEDARRRGVDERLVREVKELLDRVADEVRKSDEDIRRLLEDAARKVEESNKRNRDLLETVRRRIEK

SEQ ID NO: 12191 - protein, 181 aa, Artificial Sequence; identical to SEQ ID NO: 12190
  Synthetic

SEQ ID NO: 12192 - protein, 178 aa, Artificial Sequence
  Synthetic
SEVEKLKKEVKESSKEVIKEVEKLHRESEKSSEDVKREVEKLHRRSKEVADEVRERVRRRKDKEVIDKLADDLRRIAEETIDRVKKLVDEDREVVKDTIRRLRELADEDRRRVEDVIRKIRDERVVEEIERDVRESLRRIEEIIRRNEKRVRESLEDLKRILRENKETVRKVVDELRK

SEQ ID NO: 12193 - protein, 178 aa, Artificial Sequence; identical to SEQ ID NO: 12192
  Synthetic

SEQ ID NO: 12194 - protein, 178 aa, Artificial Sequence
  Synthetic
SEVDDLTRRVRDVLRRVEEKVRDLHRRSEKVARDVEREVEELHERSKDVARKVEEKVRRIERREDIKKLAEDLKRIVDESIKRIEELAKRLEKIVRETIKKVRELVEEVKRIVDDVIRKIRDKDVVDRIRREVEEMLRRLEDILRRNEDTVRRVKEKLKRIVKRDEEEVRKVLDRLRK

SEQ ID NO: 12195 - protein, 178 aa, Artificial Sequence; identical to SEQ ID NO: 12194
  Synthetic

SEQ ID NO: 12196 - protein, 178 aa, Artificial Sequence
  Synthetic
SEVEELKKRVEDVAEEVKDRVRKLHEKSERSSREVEKEVRKLHEESRRVAREVTERVRRIDDRDTIRELVERLKDIFRKSIEDIKRLVEEDKRRVDETIKEIKRLVDELRERVTRVIEKIRDEEVVKEIRDTVEKVLEEARKIIEDNRKRVAESVETLKDIIRRDEKTMRDVVDELRT

SEQ ID NO: 12197 - protein, 178 aa, Artificial Sequence; identical to SEQ ID NO: 12196
  Synthetic

SEQ ID NO: 12198 - protein, 178 aa, Artificial Sequence
  Synthetic
DEVEELRREVEESSRRVEKEARRLHKRSEESSREVEERLKRLHDDSRRVAREVEEIVARSEDRRVIEDVVRRLEEEVKRSIETMEELVKRDRDVVRKTIEDMERLAREDRKIIERVIKEIQDEDKVRDIKRRIDESKRKIEEIIKRDKEEAEKSEEKIKEIIERDRETVERVVRKLRE

SEQ ID NO: 12199 - protein, 178 aa, Artificial Sequence; identical to SEQ ID NO: 12198
  Synthetic

SEQ ID NO: 12200 - protein, 182 aa, Artificial Sequence
  Synthetic
EIEEIEEELKDRVRRSEEKLRRIEKELRELVEKSRKELEDLLDKDRRDMKRVADELRRDDGPDVEEALRRITEVTRKSEEEVTRLVEENKRVVEDIRRLLRELAKENKDVVREIRDLLKKVDDRRVVEELTRKLEESIKKSEDEVKKVKERLEESIRRSKERLEDARRESERVLTEIRERLR

SEQ ID NO: 12201 - protein, 182 aa, Artificial Sequence; identical to SEQ ID NO: 12200
  Synthetic

SEQ ID NO: 12202 - protein, 182 aa, Artificial Sequence
  Synthetic
EVERILDELRRRVEEVVKENEKALDTLRKESERTEEENKRLLDEAREKVDRVVKELKRDDGPDVEELLREIRTVLEDVKRRVEKSTREDKEVVKDVERLVRESSKDIRRVLKEVEEELRKTRDEKVLRDLAKKLEDVIRKSEELTKELAKRLRESSKRSIDLTRELLKRLEEVLKKVRDALR

SEQ ID NO: 12203 - protein, 182 aa, Artificial Sequence; identical to SEQ ID NO: 12202
  Synthetic

SEQ ID NO: 12204 - protein, 182 aa, Artificial Sequence
  Synthetic
SVEEIVEEIRRRSKETEDRNRRVVEELEERVRRVLEELKKIVEDARRKVEKVARELKRDDGPDVDELLKEIRDVLERVVTEVEKLLERIKKVLREIAERIKRSSERDREVVERVEKRLREVRDEKVVEELLRRLKETSDDSLRRTDELRKELERVLKEVRERLKELDRELKRVLDDVREKIR

SEQ ID NO: 12205 - protein, 182 aa, Artificial Sequence; identical to SEQ ID NO: 12204
  Synthetic

SEQ ID NO: 12206 - protein, 183 aa, Artificial Sequence
  Synthetic
KLEDILRKIEKELKEVKEKSERIVREIEKRHEDDKRRVEDIVRRIKEEVERVVKEIKEAPVPEEVIRDLIRLLEEVLREVDEVLKRVRDLNRRVVEEVRKVSEENEKLLRELLRRVREVLRANRDEVMKKVEKEVRDVIKELEDTAREVEKKSEKVLKETNDLAKEVMDKVRKVAEDLRKKLE

SEQ ID NO: 12207 - protein, 183 aa, Artificial Sequence; identical to SEQ ID NO: 12206
  Synthetic

SEQ ID NO: 12208 - protein, 183 aa, Artificial Sequence
  Synthetic
ELEEIVRRIEEEVRRADKEVKEILTEIEKEHRRDVERSDRSLEKIKRDVDRALEEVERVPVDEKVIRRIEKLLRDVLEKVKRVSERVKELNTRAVDLVRRVVEEISELLKRVLDRVRDILKANRREVMKKVTEEVREVLDRLRELLKEVAKRSEEVIKRTNELNETVMRDVERVLRELREELR

SEQ ID NO: 12209 - protein, 183 aa, Artificial Sequence; identical to SEQ ID NO: 12208
  Synthetic

SEQ ID NO: 12210 - protein, 174 aa, Artificial Sequence
  Synthetic
SEVEKLEEDFREMIERSERTLEKLKKENEDASKKSKEKLEKLLREMKEIIDRIRDLIRKGRDITELLRRLEELLERIEEELKESIRESRKLLEDIERISRDSIRRLRELLEKAERDGADEEVIKKLRELLERLEREHRKVIEELKKSNKKNEEDIRRVLEELRRLVKKLADDAR

SEQ ID NO: 12211 - protein, 174 aa, Artificial Sequence; identical to SEQ ID NO: 12210
  Synthetic

SEQ ID NO: 12212 - protein, 174 aa, Artificial Sequence
  Synthetic
REAEELLKEMKRASEKSEKIIEDLRRENEKLSKESEDIIRKLKEDNERMIRTIEELIRAGRDIDKLKKESEKLLKEIADELERSIRESRRLLEEIEKILRKSIKELRDLLEEIERRGLEEEVIKELRELLERNEREIKKVLDELRRSNEKNERDIERALEELKRTNDELAKRAK

SEQ ID NO: 12213 - protein, 174 aa, Artificial Sequence; identical to SEQ ID NO: 12212
  Synthetic

SEQ ID NO: 12214 - protein, 174 aa, Artificial Sequence
  Synthetic
DEVEKLRREIEEIIKEWEKRTRDLKREMKKISDDSRRRIEELLRDFKRIIDELRKAIEDGRDVTDLLRELRRLLEEIERRLEESIRRLKELLDRIHEEDKRLRKELEDLLKRVEDDGLSKEVIERLRELVKRVTDKVRKVNEELRKLLEDNADEIRRAIERLRELLRRLEEEAR

SEQ ID NO: 12215 - protein, 174 aa, Artificial Sequence; identical to SEQ ID NO: 12214
  Synthetic

SEQ ID NO: 12216 - protein, 174 aa, Artificial Sequence
  Synthetic
SEVEKLVREAEKIIEDIRRVIEELLRRARKINKEWDDVSRKLKEDAKRIIDTVLKLIREGRDITELAKRLDELLREIKKINDEMLKRDRDLVDEIRRRLERLLEELRRLLEKIRADGLDKDVIERLRDLVRRVKEDIERVLDEWRKSSEEAEERSRRVIEELRRLLEELKERVR

SEQ ID NO: 12217 - protein, 174 aa, Artificial Sequence; identical to SEQ ID NO: 12216
  Synthetic

SEQ ID NO: 12218 - protein, 182 aa, Artificial Sequence
  Synthetic
SELEELKKTMDEVNKETKKENDRLLDEARKVNEESRRRLEKLRKELDDVVREVEDARRRNTDKDELLRKLREILDRVRRDVERIVKRNKEILKRVEEDLRRLNEENRRILKELEDRARKNNVRSDKVERVLRELRKSSRKVHEDSKKVVEDLERSSRTVEKELRDALKELEDKVREVEKKLK

SEQ ID NO: 12219 - protein, 182 aa, Artificial Sequence; identical to SEQ ID NO: 12218
  Synthetic

SEQ ID NO: 12220 - protein, 182 aa, Artificial Sequence
  Synthetic
DELEKLLEEARKVNEETKEANERLLREMEKVNKESEDANRKLLEELKEVVDRVDDLARRNSDRDDLLRRLEEILEDLRRKAEELNRRNKRILEEVEKRLEDLNRENERILREVEERLKKANLSSEDVKRVVDELRESSREVHRRSREVVERLRRSSEEVHKKSRDVLRELTRLVREVKERLR

SEQ ID NO: 12221 - protein, 182 aa, Artificial Sequence; identical to SEQ ID NO: 12220
  Synthetic

SEQ ID NO: 12222 - protein, 182 aa, Artificial Sequence
  Synthetic
DELETLLRELERVNKETERELERLKREAEEVNKATRKDLDELRKEIDKVVKEVEEARRRNKDKDDLLRRLRDILRRVTEKLRKLIEDNERITEKIVRELKRLVRENEEILREVKKRLDEANLESERVKKVVDELRDSSRRVKEKLEDVVRRLRDLSRRTKEEVEKVEEDLRRKVREVEERLR

SEQ ID NO: 12223 - protein, 182 aa, Artificial Sequence; identical to SEQ ID NO: 12222
  Synthetic

SEQ ID NO: 12224 - protein, 182 aa, Artificial Sequence
  Synthetic
DELETLLDEAKKVNEETRRANRELRERVREVNKRTEEELKKLRDRLEKVVDDVDKLRKRNTDTEELLRRLREILKRIEEELEELKERNRRITTRVEEELERLNRENEEITRRLTERLRRANLESRRVREVEERLKKLSEDTHRDSRRLVEEMRRLSKETEKKVEDVVRDLRRLVKEVEERVK

SEQ ID NO: 12225 - protein, 182 aa, Artificial Sequence; identical to SEQ ID NO: 12224
  Synthetic

SEQ ID NO: 12226 - protein, 182 aa, Artificial Sequence
  Synthetic
DELEKLRRELEEANRRTKKANEEILREAERVDERSEEELRKILETLKKVVKDVDDMARRNSDKDELLKRLREILKELEDRLRDIVRRNREITKDLVERLKELNRRNEEITRRLTEDLRRANLEDRRVRTVVEELKKLSRETHEDSKRVVEELERLSRESERKLREVVKEMRKLVKDVEDKVK

SEQ ID NO: 12227 - protein, 182 aa, Artificial Sequence; identical to SEQ ID NO: 12226
  Synthetic

SEQ ID NO: 12228 - protein, 182 aa, Artificial Sequence
  Synthetic
DELEELLRRVEEVDKESKRRLDEIKRRMKEVNDRTREALRDLLRRLAEVVKRVLDLIRRGSDKDRLLEDLRRILREVKEAAKELLKRNREITEKMVRDLKRIVKDNKKILDDVEKTLREANLESERVKKVVDDARDSSRKTVERLETVVRDLKRSSDDVEREVRELLKELERLVKKVEDDAK

SEQ ID NO: 12229 - protein, 182 aa, Artificial Sequence; identical to SEQ ID NO: 12228
  Synthetic

SEQ ID NO: 12230 - protein, 183 aa, Artificial Sequence
  Synthetic
RELEELLRKVRKLVEEIERELKKLLEEDRRLSEESREELRKLLEDARRMIREIEELLKRRRTEEVSTTIDKILKEVEKKVKDLERRSKKISEDSRRKAERVLREIKRILEEIEKDVERVLRERDSEDAKRVLKEIRRLAEELKKSVKRVIEEVEDSNRRNEEEVRRVLEEIRRLLEDLDRKVK

SEQ ID NO: 12231 - protein, 183 aa, Artificial Sequence; identical to SEQ ID NO: 12230
  Synthetic

SEQ ID NO: 12232 - protein, 183 aa, Artificial Sequence
  Synthetic
SELEELLKDAKRVIDTSRRLITELEKRDEEIIRRIKDLLRRVTEEAKRMLDEIREELKRRRDEEVKKRIKELMDKIREDLKRVLEEIDKLSRDSEEDVRRVLDENRKLVEEVERKVREVLRRRDSEKAKRVLEEIRKLLEDSKKESEDVARKLKKSNDELRRDVERVLREIEKRLEDLKREVE

SEQ ID NO: 12233 - protein, 183 aa, Artificial Sequence; identical to SEQ ID NO: 12232
  Synthetic

SEQ ID NO: 12234 - protein, 183 aa, Artificial Sequence
  Synthetic
SELEKLLREVEKIIRDSDDLLRRLEKRNRDLIRTSEKLLKEVKDDVDRVIRELERLLEEERSEEVARRIEELMREVEEKAKRLLKENEDISRRSREDVRRVLETNKRLLDEIRRRVKDVLDRRKSEKAEDVLRRIEKLLDDSRRRSEKVAKELEESNERSKRKTEKVLKEIKEALDRVREKVK

SEQ ID NO: 12235 - protein, 183 aa, Artificial Sequence; identical to SEQ ID NO: 12234
  Synthetic

SEQ ID NO: 12236 - protein, 179 aa, Artificial Sequence
  Synthetic
SEIEKVARDVEELLKKVEKKNRDMVERVRRLLEKVKRENEELVRRVEESNERLKERVDRSNRDERIRRDVERIVKESEDLLKESHDIVKKIIEEVDELLKESHKRVREIIERIKEMVKDGGERVEELEKTVRKLARDAEKISEDVERRVRELARRLRKISEEVLRRNKELVRRVDEEIR

SEQ ID NO: 12237 - protein, 179 aa, Artificial Sequence; identical to SEQ ID NO: 12236
  Synthetic

SEQ ID NO: 12238 - protein, 179 aa, Artificial Sequence
  Synthetic
SEVEEAVERVKKLLEKVRKDNEEFRERVRKSNEEAEERNRRVVEEVRRSNEELKEKVERSNRDERIKEKVKRIVETSEKLLRESHKTAKDIIRETEELLERSHEIVREIIERVKKLLDEGGEDVEDLKRRVKELADEARRISEKVLRDNKRLLTELDKISERVLRENEKLVREVEETIR

SEQ ID NO: 12239 - protein, 179 aa, Artificial Sequence; identical to SEQ ID NO: 12238
  Synthetic

SEQ ID NO: 12240 - protein, 179 aa, Artificial Sequence
  Synthetic
SEIEKVAREIEELLRKVAEDNRRMVERVRRLLEEVKTRNKKMVDEVKESNERLKDKVRRRNASEEIKKRVDEIVETSKELLKRSSEEVERIREEVEELLRRSHETVREVERRLKDLVRKGGERVEELKRRAERLIEELRKISEEVERRVKRLVEELEEITRRIKEENDKLVREVEKELK

SEQ ID NO: 12241 - protein, 179 aa, Artificial Sequence; identical to SEQ ID NO: 12240
  Synthetic

SEQ ID NO: 12242 - protein, 179 aa, Artificial Sequence
  Synthetic
SEVEKVVEELKDLVRKSSEKNRKVAEEVKKSNDDLRRKVEEAVREVRESNERLKREVDESNRDERIREKVERIVRESEKLLKEIEDRAREIVKTTEDLLRESHKRNKEIEEEIRDLARKGGERVEELKDRVRKLIEESERISREILKTNRKLLKELEELLKRLLKRNRELVREVKEEIK

SEQ ID NO: 12243 - protein, 179 aa, Artificial Sequence; identical to SEQ ID NO: 12242
  Synthetic

SEQ ID NO: 12244 - protein, 179 aa, Artificial Sequence
  Synthetic
SDIERVVKEVKDLLEEVRKDNERVMDEVRKLLEELKRKLRKVVEEVRRSNEELKKEVDRRNVSEEIRRKVEEIVRRSEELLKRLEDTVKDIERKVRKLLEDSHREVKKAEDRIRELLKRGGEDVETLRKEVEELADDLRRISEEVRDRVRKLVTKAEEILRRVLETNKKLLKEVKETLK

SEQ ID NO: 12245 - protein, 179 aa, Artificial Sequence; identical to SEQ ID NO: 12244
  Synthetic

SEQ ID NO: 12246 - protein, 179 aa, Artificial Sequence
  Synthetic
SEIEKVAEEIKKLLRKVEEDNKTVVEEVRRSNEKLKRDNDKVVRDVERSNRELKEELDRSNVDEEIRKKLKEIVDTSRELLRESSERLEKIVRETEKLLEDSTREVKRVVTEIKDLVRKGGERVEELKKRVEELARRAKEISDKVRDDNEKLLRELREITKRVKEENDRLLKEAKDAIK

SEQ ID NO: 12247 - protein, 179 aa, Artificial Sequence; identical to SEQ ID NO: 12246
  Synthetic

SEQ ID NO: 12248 - protein, 179 aa, Artificial Sequence
  Synthetic
KEIEDVAKRVEELLRESSREVEEVLREVEELVRRSTRRNEEAVRRVRKSNKELEDEVRRSNRSEDIKRRVKEIVEESKRLLEESSKRNRDIAEEIRKLLETIKRLNDEMVRRLKELVKKGGEDVKTLLDEAKRLVDRSRELLERLLRDVRRLIKESDKITRELERKNEKLLKEVKEEID

SEQ ID NO: 12249 - protein, 179 aa, Artificial Sequence; identical to SEQ ID NO: 12248
  Synthetic

SEQ ID NO: 12250 - protein, 179 aa, Artificial Sequence
  Synthetic
SEIEDAEREVRRLLRESSERVKTVIEEVRELLRRVKRENDEAVKEVEKSNRDLEDKVRRGNLSEEIKKKVEDIVRESEDLLRRSSERVRELVEEIKRLLEELKKRNDELVRRIEELVKKGGERVEELKERVKRLVADSERLLKELRDRVKELADEARRTTEEVLRRNRELVRRIEEDIR

SEQ ID NO: 12251 - protein, 179 aa, Artificial Sequence; identical to SEQ ID NO: 12250
  Synthetic

SEQ ID NO: 12252 - protein, 184 aa, Artificial Sequence
  Synthetic
SELDEVLKTVRKIIEENEKIVKEVLDTSRRSVEEVRKHTKEVLDRVRELAKELEDATRKTSRKEDLERLLREVADRIRKLIEENRELVDRVNKENRRLIRELEERNKRSAEDLKRLIDELRKSSQTEEVDKVAEEIEKLVRESNRKVREVVKEIEKLNRDMRKESEDAVKEIEELLRTLEEKVR

SEQ ID NO: 12253 - protein, 184 aa, Artificial Sequence; identical to SEQ ID NO: 12252
  Synthetic

SEQ ID NO: 12254 - protein, 184 aa, Artificial Sequence
  Synthetic
SELDEVLKTVEKIIRDNEEIVKEVLRRSERSIKELKKHTDDILRKARKLAEELKRVVERTEDKRELERLVRRVEKEVRDLIRENRELVKEVNDRNKKLIDELKKINDDSRKTLEELIRDLERREDDKRVKDVAERIRELVEESNRKVREVVERIKDLNRKVNKTSEDAAREIEKLLEELREEVR

SEQ ID NO: 12255 - protein, 184 aa, Artificial Sequence; identical to SEQ ID NO: 12254
  Synthetic

SEQ ID NO: 12256 - protein, 184 aa, Artificial Sequence
  Synthetic
DELEEVLKRVREIIKRNEDHSDRVREKSRESVKELEEHTERVLRDVERLARELEEMIDKTDDKRDLKRLVEEVRRRIKKLIEENRRLIEEVNRRNEELIKENEKLNRESEERIRELIEDLRRRRQDKKVDDVAREIEKLLKESNDKSRELVKEIKDLNKRLNEKSEEAVKRIEDLLRRIEERVR

SEQ ID NO: 12257 - protein, 184 aa, Artificial Sequence; identical to SEQ ID NO: 12256
  Synthetic

SEQ ID NO: 12258 - protein, 184 aa, Artificial Sequence
  Synthetic
KELEDVLERVKEIIKRNEEILDKVRREVEESVRRAEEILKEVLERVRDLVRKLDDIKDKMDDKKDLKKIVDDVKKEIEDLIKELEEIITELNKENRDLIRRLREINKRSREELEELIRDLDRRRRDEEVKRVADEIKRLADESNEKVRRVVRRIDELNKEVDRKLKEVMKEIKKELEDAERRVR

SEQ ID NO: 12259 - protein, 184 aa, Artificial Sequence; identical to SEQ ID NO: 12258
  Synthetic

SEQ ID NO: 12260 - protein, 184 aa, Artificial Sequence
  Synthetic
DELEEVLRRVRKIIEENKEIVRRVLEDVKRSVEELERHTERVLREAKRLADELEDARRKIERKEDLARLVEEVKREVTRLIKENKDKIRKVNEDNRKLIEELKKINDDSKRTIDELIRDLDRRRRDEEVKRVAKELRELLERSNREVRRVVEEIKKLNDEVRKKSEEMRRRIEKLLEELERKVK

SEQ ID NO: 12261 - protein, 184 aa, Artificial Sequence; identical to SEQ ID NO: 12260
  Synthetic

SEQ ID NO: 12262 - protein, 184 aa, Artificial Sequence
  Synthetic
SDLEEVLRRAEKLIEDLERIVRKVLEDSDRSIDEVRRHTEKVLRDVRKLAEELKDIARKTSRKEDLRRIVEEVKREVKELIKDNRRLLERVNRENEKILRELRKIVEKVKRDVERLLDALDKRSRTEEVKRVIDEIRDRLRKAEERVRKVIEDIKRKNKKLREDSEKAEREIDELLRKVEEDVK

SEQ ID NO: 12263 - protein, 184 aa, Artificial Sequence; identical to SEQ ID NO: 12262
  Synthetic

SEQ ID NO: 12264 - protein, 184 aa, Artificial Sequence
  Synthetic
SELEEVLERVKDLLKKLKEHSDRVLEESKESIDRVRKHTEEVLRTARELIERLDEMRKRTSDKKDLKDLVEKVRKTVEDLLRENEELLRRVNDRNRKLIERNRDLLRKVATTVDRLIKELDKRSRTEEVKDVAREIRRRLDELRKDSERVAEEIRRLNKKLRDESRKAIKEIEELLRRVTKKVE

SEQ ID NO: 12265 - protein, 184 aa, Artificial Sequence; identical to SEQ ID NO: 12264
  Synthetic

SEQ ID NO: 12266 - protein, 184 aa, Artificial Sequence
  Synthetic
DELEEVLERVRKLIDELRKHSKEVLDTVRDLLRRHKKKNEDSLRTVRKLLTDLEDAVRKIERKEDLRRLIEDVKRKVEKIIRDNERHLREIEEEIRKLIEENRKLIEEVIRRIEELIKELDKRERDERVKRVAEEIKKLLEDLRKESEDVVKELEDLLDELRRRTEKVVREIEELLKRLEERVK

SEQ ID NO: 12267 - protein, 184 aa, Artificial Sequence; identical to SEQ ID NO: 12266
  Synthetic

SEQ ID NO: 12268 - protein, 177 aa, Artificial Sequence
  Synthetic
SEVERVERRLEKVIEEDKERTKRVEREVEDSNKKDDDLTREVLDRVRKSARDVERKLEEGKDEELLRRVLARHEEKNKKLEDDLRESTRRNAEEIKRLKKEIKESTDRTRRELEDLERKLDSREALRRLRELVKKLEDDNRRVLRRLDKLLDDVRKKNEEAMRESRDLSRKVAEKIR

SEQ ID NO: 12269 - protein, 177 aa, Artificial Sequence; identical to SEQ ID NO: 12268
  Synthetic

SEQ ID NO: 12270 - protein, 177 aa, Artificial Sequence
  Synthetic
DEVREVEKRVRESNERDKKLLREVLEEVRRSDKDDDDRTRKVLKRVEKAAEEVKRLLEKGEDRELLERVLDKLRRFIEKLKKELKESDKENEDRIRDLKRRLEESNKRNDDTIKDLERKLRSEDVIRKLRKSLKEVKDDSRRVLKELDDSLRETHKRNRDAMRRLDELLEEVARRIK

SEQ ID NO: 12271 - protein, 177 aa, Artificial Sequence; identical to SEQ ID NO: 12270
  Synthetic

SEQ ID NO: 12272 - protein, 178 aa, Artificial Sequence
  Synthetic
DEIEEIKRRIEKSSEDDKRVLRELEARAREIRKELDERVKRLEKRIKELLERLRKLKEDNRDLTEALRDLERVLEEIKRRLEEVARELKERLDEIADESRRTVEEDRRRLEELKRRVGDDRDVRRVLEEWKRLSRKNEEENKAVIEKLRALLEDLKRRLKEVLKRIAELVKKIADELK

SEQ ID NO: 12273 - protein, 178 aa, Artificial Sequence; identical to SEQ ID NO: 12272
  Synthetic

SEQ ID NO: 12274 - protein, 179 aa, Artificial Sequence
  Synthetic
RESEELRREIEKISRENKELVRRLEEAIKRLSDEDKELVERLRRETKKIADKVEDLLEKLKDVKEVVEKLLRDLKRLNDRVERESRESIKKLRDLVKKIKEASERSEREFEKLLEEIRRRRKEAEEVLREIKKIIDDNRRENREALERIKDIVRRNEEENEKALRESRKRTRELEERLR

SEQ ID NO: 12275 - protein, 179 aa, Artificial Sequence; identical to SEQ ID NO: 12274
  Synthetic

SEQ ID NO: 12276 - protein, 177 aa, Artificial Sequence
  Synthetic
SRVETIRKRVEDLIRRSEDLIRRLEEDVKRVVDEIRKLLEKLKEDDERVIRRIEDLLRKERSEEVEREIEELSKKSLDDARRVLEEIEKLARTITKEVERVLEENDRLIRKIEDEVRKINVDERVVEEIKERLDRSRRRTEEALERIRKRLEEVKKEVEDVLREVEKTNREIKKEVR

SEQ ID NO: 12277 - protein, 177 aa, Artificial Sequence; identical to SEQ ID NO: 12276
  Synthetic

SEQ ID NO: 12278 - protein, 177 aa, Artificial Sequence
  Synthetic
SRVDELRRRVEELLKRSKELLEEIKRRDEEVLRRIKELLDRLRERVDDALRKISELLTRERSEEVARRIRELLKEIEDDVRRVKKEIEDLSEDSKRKAEELLRRNEELVKRIDEEVKRINVDEEVVREIKKKLTESREDTKRLLEELKKTNDDIRKDVERLRREVEKKVRDIERRVK

SEQ ID NO: 12279 - protein, 177 aa, Artificial Sequence; identical to SEQ ID NO: 12278
  Synthetic

SEQ ID NO: 12280 - protein, 178 aa, Artificial Sequence
  Synthetic
SEVEKLLEEVRELTKRHKEELRRLNKEMEKATRDHLRKSKKLNDEAREMVRRVEELVKNNGDKDTILKTIEDVLRELEKRHKELLDTNRELLDRLRKEHDRLLKHNREVIEDVKRRLDETERAARVKEELDKLHKDLEREVRESKRTLKELHDRLRKAVEESKEHLKRLLDELRKKVK

SEQ ID NO: 12281 - protein, 178 aa, Artificial Sequence; identical to SEQ ID NO: 12280
  Synthetic

SEQ ID NO: 12282 - protein, 178 aa, Artificial Sequence
  Synthetic
DEVERLLEEVRRVVKEIEDRSRKLNEDARRVTEDHLRKSEELNRRVEDAVRRIRELTKNNGDKDKILEDLERLVREVLKAHDELLRTNRELLEEIKRRHDELLRTAEEIIRRVEERLDETEEARKIRETLKRLLDELRKKLEESKKHLDELHDRLRRELEKSKRHLEELLKRLEDELR

SEQ ID NO: 12283 - protein, 178 aa, Artificial Sequence; identical to SEQ ID NO: 12282
  Synthetic

SEQ ID NO: 12284 - protein, 178 aa, Artificial Sequence
  Synthetic
SELERLLEKARRDTERHLRESERLNRELKKATDDHLRKSRELNKRLEEVVRRVEEESRNNGDKDELLKRLEELVRRLKEEHERLLRTNRELLRRLTEEHERLLKHNRDLLKDIRDKLEKTREAKKVEDDLRDLHRRLKEAVDRSKKHLEDLHKELEDELKRSIDHLRKLLEEVKRKLD

SEQ ID NO: 12285 - protein, 178 aa, Artificial Sequence; identical to SEQ ID NO: 12284
  Synthetic

SEQ ID NO: 12286 - protein, 178 aa, Artificial Sequence
  Synthetic
SRVEDLLRRVREVVKRVKKDLTKLLEEVKRMTDEHLKRSKELNDRAEEIVRRLKELLDRRGDKDEILRRIEEVAKRLTEEHKRLLKTNKEVLDEVRKELERLLDELREIIERVKRELDDTERAREVVERLDELLKEVADRVEEVKDRLRKLHRKLEESVKKSLEHIKRLIDDLRRKAK

SEQ ID NO: 12287 - protein, 178 aa, Artificial Sequence; identical to SEQ ID NO: 12286
  Synthetic

SEQ ID NO: 12288 - protein, 178 aa, Artificial Sequence
  Synthetic
RELEKLLEDARRVVTTLTRASEKLNEDVKKVTEEHKDRIRRLLDTVRRIVEEVDKRTKGKGDKEKLLRELEKAIRDVERKLEELLKTNEELLREVKKKHDELLRTITEVMKEIAERLKKTEEARKVKEELDRLLEDLRKKLEDSKRHLDELHRELEETVREVSERLKELLDAVRRRAK

SEQ ID NO: 12289 - protein, 178 aa, Artificial Sequence; identical to SEQ ID NO: 12288
  Synthetic

SEQ ID NO: 12290 - protein, 178 aa, Artificial Sequence
  Synthetic
SELEKLLKDVADMVREITERSKKLNDELKKLTEDHDRKIKRLNERLEEIIREVEKLVDDNGDKDRILARVEKLVEEAKRAHDDLLRTNKEMVDDLKRRHDELLRRIDEIIKDARRKLSETDEARKVAERLKELLDRLRRKLEESKRHADELHERLRKSVEDSKKHIKDLVDELKRRVD

SEQ ID NO: 12291 - protein, 178 aa, Artificial Sequence; identical to SEQ ID NO: 12290
  Synthetic

SEQ ID NO: 12292 - protein, 178 aa, Artificial Sequence
  Synthetic
SRVEELLKRLEDATRRHLEVSKRLNDDLRRATKDHLDKLRELNERVKKVVDDVVEKIKSNGDKDKLLRDAEELVRRVKKRHDELLKTNEDLLRRLEELHKRLLDHNRELLREIKERLDDTEEAREVRERLDRLHEELEKEVRRSEKTLKELHDRLRKEVERSKRHLDELLKDLEDKVR

SEQ ID NO: 12293 - protein, 178 aa, Artificial Sequence; identical to SEQ ID NO: 12292
  Synthetic

SEQ ID NO: 12294 - protein, 178 aa, Artificial Sequence
  Synthetic
SRVEKLVREVEKVVEEVERTIRKLLEDVKEMTDRHLKMIEDLNRELEEIVRRVTELIKNNGDKDRILEEVEKAVEEVDRRHKRLLETNKEIIDEVKKRLDDLLRRLRKIADEVRKRLDDTDEARKVKKRITELVERVEREVDRVKKELEKLHERLKREVEKSSEHIKRLLDELRKRAE

SEQ ID NO: 12295 - protein, 178 aa, Artificial Sequence; identical to SEQ ID NO: 12294
  Synthetic

SEQ ID NO: 12296 - protein, 178 aa, Artificial Sequence
  Synthetic
RELEEILRRVKEVTKDHLDKIDELNKRLDKATKEHLERLRDLNRRLKEVVERIEEEIRNNGDKKKILERLERVIRELRKRHKDLLDTNRKLLEELRKRHKELLDHNREVVERVEEELKETREADKVRKDIRRLHEELAREVKKSEDHLRKLHEELRDEVRRSEEHLDALLEDLKRKVD

SEQ ID NO: 12297 - protein, 178 aa, Artificial Sequence; identical to SEQ ID NO: 12296
  Synthetic

SEQ ID NO: 12298 - protein, 178 aa, Artificial Sequence
  Synthetic
SELEKLLRDMEEATKRHDEMLKKLNDEIRKVVERILKELEDLNRRLEEIVRRLKEESKNNGDKDRILEEIRRVVRELEERHDRIEEEIRRVLERLEREHERLLEHNRELLEDIKRRLSKTEEADDVRRRLERLHRELRKSVETSKKHLKELLDRLAKSIEDSKKHARELLKRLEEDIK

SEQ ID NO: 12299 - protein, 178 aa, Artificial Sequence; identical to SEQ ID NO: 12298
  Synthetic

SEQ ID NO: 12300 - protein, 178 aa, Artificial Sequence
  Synthetic
SEVEELLDRVRKVVEDLMRESKRLNDELKKIVDDILRRLRELNKEIKDVVDEIKKLLDNNGDKDEILKTIKKVLEDLKRKHDELLKRITEVVEDLKRKHDRLLEEAEKVIEDVERKLDKTEEADKARKDLKRLLDRLRREVERSKEEMDKLLEDLERAVRESEKHLEKLLRDLERRAR

SEQ ID NO: 12301 - protein, 178 aa, Artificial Sequence; identical to SEQ ID NO: 12300
  Synthetic

SEQ ID NO: 12302 - protein, 178 aa, Artificial Sequence
  Synthetic
SRLEELLKRLDDIVKRVLTKIRELNERLKKIVEELLRRSEELNREVRRVAEEIRRLEEGNGDKDKILDEIRRILKRLKEEHERLLKEAKEVVDKLRRDHEELLRELKEAADDAERKADDTDKARDVRRTIRKLVRDVAEAVRRSTEHIDKLLEDLEREVRRSERDIERILRELEEEAR

SEQ ID NO: 12303 - protein, 178 aa, Artificial Sequence; identical to SEQ ID NO: 12302
  Synthetic

SEQ ID NO: 12304 - protein, 178 aa, Artificial Sequence
  Synthetic
SDVEKLLEDVRRMTEEHKELIKELNERVERIVRKVVEDSKKLNDELREIVKRVEDESRNNGDKDKLLKELRDVVRELKKRHDDLLRDAERVIEEAKRRHDELLKHNKELIDDVKRRLQETEEAARVREDLDRLHEELERFVRESKKHLDEMLKELRRRLERSKEEIDRLVKEAEEKLR

SEQ ID NO: 12305 - protein, 178 aa, Artificial Sequence; identical to SEQ ID NO: 12304
  Synthetic

SEQ ID NO: 12306 - protein, 175 aa, Artificial Sequence
  Synthetic
REVEEVLKEVKKIVDRNREELKRVLDEIRELVKRIEDDLRRVNEESEKLVRTLLELMRRGELREEEIRKIIEDIERKYRELERKVEEIIKEIEERITRLEEKNRRNLEDIRRLLDEINAPEEVRERIERLIEKSERDVREVKKKVEELARRLREEVEKLKKHVKRLLEELKKAAD

SEQ ID NO: 12307 - protein, 175 aa, Artificial Sequence; identical to SEQ ID NO: 12306
  Synthetic

SEQ ID NO: 12308 - protein, 179 aa, Artificial Sequence
  Synthetic
SEAEDALRKIKKLVDEVVERIKKVDDDSRKLVEEVERTIEKLDKESEDLVKKVKDMKRRGDVREKDIKRVIDTSRELVKKLKEDVDRVVEEIKDLNRKLNEDVKRVMDEIRELLKELEKRGVLREEVKKEVKRLLEELKRRLDESNKRNKRLIDELRKKLEDSRRRNEELLRDLKETAT

SEQ ID NO: 12309 - protein, 179 aa, Artificial Sequence; identical to SEQ ID NO: 12308
  Synthetic

SEQ ID NO: 12310 - protein, 179 aa, Artificial Sequence
  Synthetic
DEAEEVERRSRELVERAKTEIEKLDRESKRLVDTVARKIEEVDKRSEELVRTVEELRRRGDAREEKIKKVIEDSKELVRKLKEIVKKVIREIEKLNDELNKEVERLSKESEDLLKKLREDGILREEVEKENRELNRRLKEALDESNKRNRTLLEDLRRKLRESEERNRRLLRKLEEDAR

SEQ ID NO: 12311 - protein, 179 aa, Artificial Sequence; identical to SEQ ID NO: 12310
  Synthetic

SEQ ID NO: 12312 - protein, 179 aa, Artificial Sequence
  Synthetic
SEAEEALKKVEELVRRVEEEIKRVDERSKDLVRRVERKLEELVERSKELVKRLLDMRRRGDIREEEIERVSRESKRLLDEAEKDVRRVVREIEKLNEDLNRRVDKVAKEIRDLVRDLKRRGVLREDVERRVRELIERLKRKLEESNRRNKKLIDELRKRLEEVKRENEKLNEDLERETK

SEQ ID NO: 12313 - protein, 179 aa, Artificial Sequence; identical to SEQ ID NO: 12312
  Synthetic

SEQ ID NO: 12314 - protein, 179 aa, Artificial Sequence
  Synthetic
DELERVLKRVKELIDKSRREDEELDERSKELVKKVLDELKDALRKIEKLVRDLKEMTDRGDIREEEIKRVAKEIEELLEELERRVRKVTEEIDRLNKESHERNRRVAEEIKRLLDELKRRGVIREEVRKDAERLIRENEEDNRRSNERNKKILKELKDALDRVKEEVRKLIRRLEEEAR

SEQ ID NO: 12315 - protein, 179 aa, Artificial Sequence; identical to SEQ ID NO: 12314
  Synthetic

SEQ ID NO: 12316 - protein, 179 aa, Artificial Sequence
  Synthetic
SEAETVLEEVKKLVERSREEDKEVDDESRELVERVEEKLRRVLKKSKEDVDRVMRLIEEGKVREKVIEEVSRTSEKLLRDLEETVRRVVKRIEELNRESHERNRRLEEDIRRLADELRKRGVLTEEVEDTIRRLIEENKKRNEESNRRNRELIKKLERKLEEVKRRNEDLNRKLEETAR

SEQ ID NO: 12317 - protein, 179 aa, Artificial Sequence; identical to SEQ ID NO: 12316
  Synthetic

SEQ ID NO: 12318 - protein, 176 aa, Artificial Sequence
  Synthetic
STLEEAEEEVRRLIKRTEDETRRVADEVKKLLDKHRRATEDVEKKVRELLDRLKKDEKDEDVRRVEERVRELLEELKRTSERIAEEVTRLLEELERSSRRVVEENERLLEELKRLTDDREIEKIVRRAKETNEENREIIERILKEIKELIDDANRKLKEILDRIRELVETVKRKAK

SEQ ID NO: 12319 - protein, 176 aa, Artificial Sequence; identical to SEQ ID NO: 12318
  Synthetic

SEQ ID NO: 12320 - protein, 176 aa, Artificial Sequence
  Synthetic
STLEEVERRIRELLDRHRRATEEVEKEVDRLNKETRDELDRVRKEIEKLLKDLDRKERDEEVKDVERRVRELLKEAEKIVRDLERENKRLLDELRKTSKEIAKRVTDLLEDLRRLTDDEELRRILKRVEKLVKDLNDKLRKILDDARRSNEEIKRRLEEILKEVKRLVDTVTERAR

SEQ ID NO: 12321 - protein, 176 aa, Artificial Sequence; identical to SEQ ID NO: 12320
  Synthetic

SEQ ID NO: 12322 - protein, 175 aa, Artificial Sequence
  Synthetic
SRIERAEEELKRSLKELREDLERVVRTIRKILREHEEKSKDVKRRIEELLREVKKRMVKDREILRELEERVRKIEEDLERISDELRKVAERVIEEAKRLVDEDADRIRKIIELLRAGKDVDKVLRDVEDLNRTTLKLLEDLLRTVEEVVRRADKLLEDLLREIKRLVDEVMERDR

SEQ ID NO: 12323 - protein, 175 aa, Artificial Sequence; identical to SEQ ID NO: 12322
  Synthetic

SEQ ID NO: 12324 - protein, 175 aa, Artificial Sequence
  Synthetic
SEIEEIEKEIRKSVEEVKKTLDKVVTEIRKSTREHEKKSEEVRKRSKELNKDLRDRLVRDEKILKEVEDRSREMNDRLRKLSERNRKLNEDLIRRLEELVKRDKERVEDVERKLRAGKDVKTVLDDVRRVNEETKKRIRDLLEESKRSDEEADRRAEELLERNERLVRKVAEEAR

SEQ ID NO: 12325 - protein, 175 aa, Artificial Sequence; identical to SEQ ID NO: 12324
  Synthetic

SEQ ID NO: 12326 - protein, 175 aa, Artificial Sequence
  Synthetic
SRIEEVIRRAREILEDHRRKSTEVRERLKKLLKEHEDKSRRVKEESEKINRDVKRELVRDRKILEELKRRSDRLNEELDRLSKDVADKIRELIKELKRISDDLKRRIEEIIEMLRRGKDVDKVLKEIEDLVRKADELLRELLKRVEDLVRRADEVLEELLRRNRKLAEDVMRKDK

SEQ ID NO: 12327 - protein, 175 aa, Artificial Sequence; identical to SEQ ID NO: 12326
  Synthetic

SEQ ID NO: 12328 - protein, 175 aa, Artificial Sequence
  Synthetic
REIEEVEKEIKKLLDEHRKKSDDVVRKLEKILRDHERRTEDVKRESEKINREVEKRKVRDREILTDLKRRSKELNDRLDKLSRELAERIKELIKRLRDLSRRVAEVVREVRKLLRAGKDVDEVLERVRELLERADRKLEELLERVRKLVEDANRVIEEVLERNKRLADEAMKKDK

SEQ ID NO: 12329 - protein, 175 aa, Artificial Sequence; identical to SEQ ID NO: 12328
  Synthetic

SEQ ID NO: 12330 - protein, 175 aa, Artificial Sequence
  Synthetic
SRIEEIVKRIRDILKEHEDKSRRVVEDIKRSTEELKRALREVVERIKTILDDVRRRLVRDEKILRELEKRVREVIRKLEKLVEEDEDRDRELIERLKEISRTLRDVVRTVEKLLRDGKDVDKVLEDVRRVAKEADDRLEELLERSKKLNKETLDELERLLREVEELVKEVAERDR

SEQ ID NO: 12331 - protein, 175 aa, Artificial Sequence; identical to SEQ ID NO: 12330
  Synthetic

SEQ ID NO: 12332 - protein, 175 aa, Artificial Sequence
  Synthetic
SRIEEVSERVREILRRHEEKSREVVERIKKSTKELRDEVRKVRATSKEINDDVRRRLVRDDKILKELEKRSKELNDRLDELVRRDEELDRRLIEELKRLSDELRKELEDVDRKLKAGKDVDRVLERVEKMVRDADKRIDEVRKESERLNEETRRRIERLLRENKKLADEVAERAR

SEQ ID NO: 12333 - protein, 175 aa, Artificial Sequence; identical to SEQ ID NO: 12332
  Synthetic

SEQ ID NO: 12334 - protein, 175 aa, Artificial Sequence
  Synthetic
SRIERVEERMRELLDRHRETSKRVVEEIRKSTEEHKEKSERVVRESERLNREVERELVKDKDILRELKKRSKELNDELRKLSKDNEERNRELIRRLEELSKRVEDTIREVIKLLRAGKDVDRVLEEVERLVTEVNREIKELLERSKRSDKEADRRLEEVVKTNRELAERVARRAT

SEQ ID NO: 12335 - protein, 175 aa, Artificial Sequence; identical to SEQ ID NO: 12334
  Synthetic

SEQ ID NO: 12336 - protein, 175 aa, Artificial Sequence
  Synthetic
SEIEEVVRRLEELVKRVAEELKRVVDRIEDLLREHKDKSRRVEERSKEINEDVARRLVSDKDILRELEKESRRLNKELRELSERVEREIKKVIKEMEEMLKELEDRVREIIKLLRAGKDVKEVLERVKKLVDDLIRRLKKLLEDLKKLVDDADEEIKRVLEENEELARRAAERDT

SEQ ID NO: 12337 - protein, 175 aa, Artificial Sequence; identical to SEQ ID NO: 12336
  Synthetic

SEQ ID NO: 12338 - protein, 175 aa, Artificial Sequence
  Synthetic
SEIEDVVRRARELLERLRKRVREVVEDIRRSTEEHKEKSERVVKTSEELNKRLEDELVRDKDLLKKVKDESKKLNDELRRLSEENSKRNEELIKRIEKLVDDVAERIKEIEKMLRDGVDVDKVLEDVRRLVKEAVDRIDKILRDSRESDRRADEEIKKVLDRNRELVKKVADEDT

SEQ ID NO: 12339 - protein, 175 aa, Artificial Sequence; identical to SEQ ID NO: 12338
  Synthetic

SEQ ID NO: 12340 - protein, 175 aa, Artificial Sequence
  Synthetic
DEIERVEEEIRRLLEEHKKRSDEVVRRLEKLLKDHKEVTRKVVEESERINRDVERRLVRDERILKDLKDKSKELNDELRKLSEDVERMIKRLIEELRKLSKDVEDTIRELEKALKAGKDVKEVLERIRKLVKDVNKRLEEILEEVERLVRRANRRIEELLERNRRLVEEVARRDE

SEQ ID NO: 12341 - protein, 175 aa, Artificial Sequence; identical to SEQ ID NO: 12340
  Synthetic

SEQ ID NO: 12342 - protein, 175 aa, Artificial Sequence
  Synthetic
SEIEKVEEEIRRILEEHKRISDEVKRRVRKSTEEHEKRTEDVERRSREINEEVEARLVRDKDILRDLKRRSKELNDEARKLSKRNRETNTRLLEELDDISRELKERIERIEKMLKDGKDVEEVLRRIRKLAEEVNKELKRLLDESKESDDRLNKRLTEILRENEELARDVARRVK

SEQ ID NO: 12343 - protein, 175 aa, Artificial Sequence; identical to SEQ ID NO: 12342
  Synthetic

SEQ ID NO: 12344 - protein, 175 aa, Artificial Sequence
  Synthetic
SKEERIEEALRDLVRRHKEVSRRVVETIKDLAKKLEEKLRRVETDSKRINDEVRDKLVRDKDILRDLERRSRKLNEDLRRLLREIKERLRKIIEELKRLSKDVEDKVRELIKLLRDGVDVERVLEEIKKLVEEVNRELRELLKRIEELLKRAEEMLERLLRENRRLVEEVARRDK

SEQ ID NO: 12345 - protein, 175 aa, Artificial Sequence; identical to SEQ ID NO: 12344
  Synthetic

SEQ ID NO: 12346 - protein, 179 aa, Artificial Sequence
  Synthetic
SESEELDKEIDDIVREDEELNKELRKRNDDAVRRVEKVIEDLLRRNEDAAEKVKKLLEELKDVKEVLEKLIRDLERLHRETRELLERLIRELEELHERSKRESEKSIRKVKELLERIKERSKEVRELLRKLREILEDLRRKNERTEEESEEILRRLTKLAEEVLRRSRKILEDLREALR

SEQ ID NO: 12347 - protein, 179 aa, Artificial Sequence; identical to SEQ ID NO: 12346
  Synthetic

SEQ ID NO: 12348 - protein, 179 aa, Artificial Sequence
  Synthetic
SEKDELRKRMRDISKENKELLEKLEREIRELSKENEKLNEKLRRELEELRKTIKDLLDRLKDVKEVVEELLRRAERLLERIKELLDRSNKKLEELLRKVEEDLRRSNEKLETLLREIKERSKEARELLKEAKELLEENRKRNEEILRRAEKVLRDNAEKDKRTLEKVEEILDRLRRELT

SEQ ID NO: 12349 - protein, 179 aa, Artificial Sequence; identical to SEQ ID NO: 12348
  Synthetic

SEQ ID NO: 12350 - protein, 179 aa, Artificial Sequence
  Synthetic
KEAEDLEREMREISDRNRKLNKKLRRDIKEISDDNRRLLEELRRRLKKMEEDVRRLLEELKDDKDVVEELRKELEELVRRIEKDLRKSNEKLEKLLRDVEEALRDSNEKLERLLRKIKERSKEVRELLTEARKLLERNREEDKKSLDDARKALKENKEENDKIKEEIDKILRELEEELR

SEQ ID NO: 12351 - protein, 179 aa, Artificial Sequence; identical to SEQ ID NO: 12350
  Synthetic

SEQ ID NO: 12352 - protein, 179 aa, Artificial Sequence
  Synthetic
EESERLAKRVDDLSRENEELNKRLRDEMEKISRENKELLKDLRRKADKIVKDVERLLEELKDVDEVVRELKKRLEDLMDEIRKALKRSNEKLKKLLEDIKEALERSNRKLKELADDIRRRSKEARELTRRIEKLLKDNTDRDKKSEDDLRELLKENKKRNDEILEEIRRILEELRKKLT

SEQ ID NO: 12353 - protein, 179 aa, Artificial Sequence; identical to SEQ ID NO: 12352
  Synthetic

SEQ ID NO: 12354 - protein, 180 aa, Artificial Sequence
  Synthetic
SLDKEIERKVEEIERRLKESNDRLREKVDEIRRRSERLNTELNERVDRIAERIRRMKRDGTKDVEELVRKLAKELRELLKEVVERDEKLLRDLEKTAEEVIRENKRLLDELRKLVEDLKRAGSLEERLEEKIDRIIRELERRNDKSREELEKIIRELRERTKESEKRLEDIIRELEERTR

SEQ ID NO: 12355 - protein, 180 aa, Artificial Sequence; identical to SEQ ID NO: 12354
  Synthetic

SEQ ID NO: 12356 - protein, 180 aa, Artificial Sequence
  Synthetic
DADKRLRTDVRRIVEDLKRSNEELRRRSEEIAKRSDKLNKELNKKSKEIEERVKRMRDEGRKDVEELVKRLIEESRRLTEEVLKKDEELVRESRRLTEEVKKRNDKLLRELEKRLDELKKEGVITKDLEKELRDIIRELRERNRESEEEDERIIRELEKRTKDSEKRDDEILRELEREIR

SEQ ID NO: 12357 - protein, 180 aa, Artificial Sequence; identical to SEQ ID NO: 12356
  Synthetic

SEQ ID NO: 12358 - protein, 180 aa, Artificial Sequence
  Synthetic
SLVEKIAREVRKIKEDSKRLNDELNEKVRKAVEDLERSNRELEKRVREIEERVRRAETEGRKDVEELVKRLVDELRDVLEKVKRTNERLLRELERTAKEVSDRDRELVRRLRELVKDLKRKGSATKELEDDIERIIKELEELTRRSEEKLRETIERLEERNKETAERLERIIKELEERSK

SEQ ID NO: 12359 - protein, 180 aa, Artificial Sequence; identical to SEQ ID NO: 12358
  Synthetic

SEQ ID NO: 12360 - protein, 180 aa, Artificial Sequence
  Synthetic
KEAEELEERVKRIEEESRRLNRELNEKVKDIAKKLEDSNDKLRKDSEEIAERVKRARTEGRKDVEKLVDKLIKESEKLTEEVKRENKRLMDELRELLKKVKDDDRELLERLRKLVKDLRREGSIKDEVVKKLEDIIREIEKTTRESEKRLEDIIRKLKKKNDDTEREDREIVKRLREETK

SEQ ID NO: 12361 - protein, 180 aa, Artificial Sequence; identical to SEQ ID NO: 12360
  Synthetic

SEQ ID NO: 12362 - protein, 182 aa, Artificial Sequence
  Synthetic
SLLEKLERDVERLSEEDEKLNEDVRRVDREIVERDKKLNREVNERVKRLAEEVKDIRRRVKDDETAKRLLDKVAEEIKELAKRLEEESRKLVRESEELVKRLERMSEELVKEIERLVKKLKDEGKLRERAEERLRRIIKRNKEENERTAKESRDSIEELKERNERSKRRLEKILEDLERETR

SEQ ID NO: 12363 - protein, 182 aa, Artificial Sequence; identical to SEQ ID NO: 12362
  Synthetic

SEQ ID NO: 12364 - protein, 182 aa, Artificial Sequence
  Synthetic
REAEELEKRVRKIEREDDKLNEELNRRAKDVSREDKELNDRVREVVRRLVEEVDRIRRDVKDKRDAREKVREIMDRIRRLLEELKRRSDELAKELRELLEELERRSKKLVDEIKEVVRKLKEDGKLREELEKKLEDIIRELKKRNDESAERIRRLIKTNEDENRRTAEEIKKILDDIRRKVK

SEQ ID NO: 12365 - protein, 182 aa, Artificial Sequence; identical to SEQ ID NO: 12364
  Synthetic

SEQ ID NO: 12366 - protein, 186 aa, Artificial Sequence
  Synthetic
SELEEIRKKIDDLRRRVEEINERITREDKRLVDELKEINKRITDRVRKIARDVEELLRKGEPKSRVKKMLDDAERELRRLLKELREMHERIVETSKELNERLREVHKRIAEEAKKLVDELRREGGRDEERLRTVDEEVKKILDELREKLDRNRRRSEETNRRLDELLKENARRVEEIIRRLREEVK

SEQ ID NO: 12367 - protein, 186 aa, Artificial Sequence; identical to SEQ ID NO: 12366
  Synthetic

SEQ ID NO: 12368 - protein, 186 aa, Artificial Sequence
  Synthetic
SELEEIKKRVEEIARTLEKLNRDITKLDEDLAREVEDINRRITETVEEIAKRVERLREKGEPKEDVRRVLDEVEKELKKLLDELEKFHRDIMETSKDLLRRLREAHDRVIKELKDLVRELEREGGRDKERLDKLRTEVKKIMDDLRRILEKNAKDSKRSLDRLRKILEDNKEKVKRIADRLREAVR

SEQ ID NO: 12369 - protein, 186 aa, Artificial Sequence; identical to SEQ ID NO: 12368
  Synthetic

SEQ ID NO: 12370 - protein, 178 aa, Artificial Sequence
  Synthetic
KDEKRIKDVLKKLEDDNKKLNDEIKKLNEEIARKNEELNKRIEDMIRKAEREVDELKRNGADKEVLERILRRVKELIDRLTRALEDSLRESKRLSEELARALEESLRRIKEVIDRLREENKEAKEVDDEARRILEKLRRENERTKEESKEINEELEKRNRESVERIKEILRRLEEKLR

SEQ ID NO: 12371 - protein, 178 aa, Artificial Sequence; identical to SEQ ID NO: 12370
  Synthetic

SEQ ID NO: 12372 - protein, 181 aa, Artificial Sequence
  Synthetic
SEVERLLREVEKVLRRVVKRSRDLNEELKKRSKEHKETSERLNREMKRVLREVEKKIDETRDKETLDRLLREVEEVLKELKKRHDELLRHNKKVVDELKEEHKKLLKEAEDALREVKKELDKRGGVREVKKRLDELLKRLEREVRESEKRMDRSHEDVRREAERSKKELEELLKKLEDKVR

SEQ ID NO: 12373 - protein, 181 aa, Artificial Sequence; identical to SEQ ID NO: 12372
  Synthetic

SEQ ID NO: 12374 - protein, 181 aa, Artificial Sequence
  Synthetic
SEVEKILRDVEDATRRHKRTSEELNRRLEEVVRRVKEESKELNERLREVVKRVKEEIRKTTDKETLDRLAEELKRVVEDLKRRHEELLRRAEEVVKDLKRRHDELLRHNRRLLKEVKERLDDRGGVREVKKRIDELHDDLRRVMEASKERIDRILEDLRRVVERSKEELRKLLEDLKRTVD

SEQ ID NO: 12375 - protein, 181 aa, Artificial Sequence; identical to SEQ ID NO: 12374
  Synthetic

SEQ ID NO: 12376 - protein, 181 aa, Artificial Sequence
  Synthetic
SEVEELLKRVEEATERHKREIERLEDEIRKVLEDVDKRSKELNDHNRDVIEKIRERIERTRDKDTLKKLVDDLRELSERHKREHDRLLEEVKRVAEDIKRRIDELLRHNEELLRDVKRRLEERGGVREVKTELDKLHEDLKRTAEEVKKRLDDLLKELEKKVEESKTEIDRSLEELEKTAR

SEQ ID NO: 12377 - protein, 181 aa, Artificial Sequence; identical to SEQ ID NO: 12376
  Synthetic

SEQ ID NO: 12378 - protein, 177 aa, Artificial Sequence
  Synthetic
DEERRVKEELEKLLEDLRRTIKKVEEDSDRINKDLERVIRRSEREADKILEDLERAGVSEELLKRLEDLVKRIKETHEELLRRLKKSSDELREELERLLREIEKMVRDAEDVLRRNVSEEKLRELLERAKKLVEDIKRRLKELLDRHRDLVRRIKERSKELNKRLKDLIDEIKERAR

SEQ ID NO: 12379 - protein, 177 aa, Artificial Sequence; identical to SEQ ID NO: 12378
  Synthetic

SEQ ID NO: 12380 - protein, 177 aa, Artificial Sequence
  Synthetic
SSKDDLRRKIEKLLRDLERVIRESEKRSEEINRDLERTLKRIKEEADKILDKVRRGGVSEDLLRELEELVKKIERRLEELRKELEDSSRRLRETHERLRRDLERIVDELEKALRNNIDDRLLEKLLRELEKLIRRIEEESRKLNEEHEKLLKRIKDELKKLLDDLRRLAREIEERRR

SEQ ID NO: 12381 - protein, 177 aa, Artificial Sequence; identical to SEQ ID NO: 12380
  Synthetic

SEQ ID NO: 12382 - protein, 177 aa, Artificial Sequence
  Synthetic
KSTEDAKREIDKLLEELEETIRRAEDRSRRLNEDLARTLKRIEEELKRINEEVEKRGVSEKLLEDLRRSTEELKRSLRELLRRLEESSRRLKERAKRLLAELERIVEELKRALDDNISDELLKKLLDELRELIDRIRRDLERLLREHEELIERIKRTLEELLRRHRELVKRIEETAR

SEQ ID NO: 12383 - protein, 177 aa, Artificial Sequence; identical to SEQ ID NO: 12382
  Synthetic

SEQ ID NO: 12384 - protein, 177 aa, Artificial Sequence
  Synthetic
SEEDRLEEEIKRILDDVARVVKRIKEELKRINDELKKVIDESRDHARRVNDDVRRRGVSEELLRELKESTERNDELLKKLLKEAKESTETITRELDRLLEELKKIVDELRELLKKNISEELLKELLKRLEELARRIKKKLEELLREHEKLLEEIEKALRRSNEEHRKLVEKIKRDAT

SEQ ID NO: 12385 - protein, 177 aa, Artificial Sequence; identical to SEQ ID NO: 12384
  Synthetic

SEQ ID NO: 12386 - protein, 177 aa, Artificial Sequence
  Synthetic
DEEERVKEAVERLLRDLERAIKESEDHLRRLNEDLDRVIRESKEHLKKVNDDVRRAGVDKRLLDELKKSTEDNKKTADDLKRKLKRSTDENKKRLKRLEEELRRLVERLKEALRDNISEELLKKLLEELKRLIERIKRDLKRTNDEHEKLIREIKKRLEDSNRDHERLVKDIKETAR

SEQ ID NO: 12387 - protein, 177 aa, Artificial Sequence; identical to SEQ ID NO: 12386
  Synthetic

SEQ ID NO: 12388 - protein, 177 aa, Artificial Sequence
  Synthetic
SKEDRLREELKKLLKRLREEIERLKRALEESNKDLKRTIDRSEKHLRDVNEDVKRAGVSEELLRELERSTRENKERAKELLKRHEDLVRKVEKELRDLLRRLEEIVRRVDEMLKRNIREEELDKLLKEARDLIREIEKRLEELLKRVEKLTEDAKRDLERSNREHKELADRIKETAR

SEQ ID NO: 12389 - protein, 177 aa, Artificial Sequence; identical to SEQ ID NO: 12388
  Synthetic

SEQ ID NO: 12390 - protein, 177 aa, Artificial Sequence
  Synthetic
SEAERIEEEARRLLEELRRAIERVKEEADRLLEELRDAIRKSKEHLKRLNEDVERAGVEERLLDALRKSTEDNERLLRDLLRKLEEAVRRLEEEARRLLKEAEEIVREIKKVLDNNVSEEALKRLLEKLKRLIEEIKRELKRLLDDLKRLIDEIAEALKRSNDRHEELVRRIKEKAR

SEQ ID NO: 12391 - protein, 177 aa, Artificial Sequence; identical to SEQ ID NO: 12390
  Synthetic

SEQ ID NO: 12392 - protein, 177 aa, Artificial Sequence
  Synthetic
DSKEEIRRKIDELLKRLEETIRRSEEHFRRSLDDARKELKRSRDHVRKVNKELRDRGVSEELLKEAERSTRENEKLLKELEERLKRHLEENKKIADKLLEELERLVRRLREVLKKNVDDEELERLLRDLERLIREIEKTLEDTNRSNEELVRRLKRRLEESNKRHEDLADEIRRRTD

SEQ ID NO: 12393 - protein, 177 aa, Artificial Sequence; identical to SEQ ID NO: 12392
  Synthetic

SEQ ID NO: 12394 - protein, 177 aa, Artificial Sequence
  Synthetic
SEEDRIREEMEEILRRVERTVEEIKKELKKINDDVDRTARESEKHVREVLERVEREGVDKDLLDELRKIVEENKRLAKRLKDELRKSTKKIEDDLKRLLDELKRLVEEVDEALKRNISEELLEKLLEDLKRVVEKIRRDAEDLLERHKDLVRRIKEELRRSNRKLEDLVKKISERAT

SEQ ID NO: 12395 - protein, 177 aa, Artificial Sequence; identical to SEQ ID NO: 12394
  Synthetic

SEQ ID NO: 12396 - protein, 177 aa, Artificial Sequence
  Synthetic
DEDREVRRTLEELLDDLRRVIEESERHLEKLNEDVREAIRRSEEHVRRVLDRVRRGGVNEKLLEELDKIVKENRKLLEELLRRLEESTKRNRDEAKRLLEELADIVRRIEELLRDNISEDLLRKLLEEAKRVLDEIRKTLKKTNEDHERLVERIKRELEKSNKDLERLAKEIIDRDK

SEQ ID NO: 12397 - protein, 177 aa, Artificial Sequence; identical to SEQ ID NO: 12396
  Synthetic

SEQ ID NO: 12398 - protein, 177 aa, Artificial Sequence
  Synthetic
SSKEDITKKIEELLRELEEELKKSEKHLRELNEEAKRTAEESRRHLEESLRKVEKDGVDEDLLRKLEEHVRDNERRARKLLKDLKDSTDTNRRTAKRLLERLKELVERIKEMLKRNIDDEELKKLLKELEDLVKEIKERLRKTNEEHRKLVEEIKERLKRSNESNERLVRRIEEEAR

SEQ ID NO: 12399 - protein, 177 aa, Artificial Sequence; identical to SEQ ID NO: 12398
  Synthetic

SEQ ID NO: 12400 - protein, 179 aa, Artificial Sequence
  Synthetic
SELERAEEEIEKLNRDLKRTLDEIRDRIRKINDDLRKTLRKSDEDSKRLLKELRDEVPDLREVDDRIRKIIKENKDLARELKREAEDSSRDLERILREIEETVRDSSRKLKELLERDKESGEKLKDMLDKHRKLIDDLKRRLERRLREHKRLLDEIEKRLRDSLKRIEEIVREILERAR

SEQ ID NO: 12401 - protein, 179 aa, Artificial Sequence; identical to SEQ ID NO: 12400
  Synthetic

SEQ ID NO: 12402 - protein, 179 aa, Artificial Sequence
  Synthetic
DELERIRRELERINTTLDELLKRSKEETDRILKKVEDSIREVEKKVKELLEELKRRVPDLRKVEEDVKRVLDELRRRLRKLLEKLKRLADDNRRKLKELKDEAERSSREVERLLREKKESGELLKKILDEHRDLLRRIEEELRRSLEDIKRVAKEVEERIKKVLDELRRLIEELLRRAK

SEQ ID NO: 12403 - protein, 179 aa, Artificial Sequence; identical to SEQ ID NO: 12402
  Synthetic

SEQ ID NO: 12404 - protein, 185 aa, Artificial Sequence
  Synthetic
SVLEEAEKELRKIVEDNRRTLREVKERNKKLNKENRDTIKKIEDDVRRIIRELKEDLKRSEKDELRKELKEVEEEIRKLIKDAREHSDRVIRESKKLVEELERRTRELEERIKKLIKDIADRFGGGEEDLRRLEEEIRRRSEENKKRIRDLLRRSEELSRRDKKKLKEILERIKRLADEVREKIR

SEQ ID NO: 12405 - protein, 185 aa, Artificial Sequence; identical to SEQ ID NO: 12404
  Synthetic

SEQ ID NO: 12406 - protein, 186 aa, Artificial Sequence
  Synthetic
SDLEDILRKIEDLSRKNEEELKRVLEENKKLSDDDKRRLEKILREVEKKIRKIKKDIKDEKDKEKLRKKVEDLEREAKELVDDLRRHSEELSKRSEKSLRDVKKHSDDVAKRARELVKELVDRRGKETEEVRKLEEDVRRIIERNKKLTEDLARELKKLNDDNERTLRKVEEDIRRIIADLRRTLK

SEQ ID NO: 12407 - protein, 186 aa, Artificial Sequence; identical to SEQ ID NO: 12406
  Synthetic

SEQ ID NO: 12408 - protein, 186 aa, Artificial Sequence
  Synthetic
SELDEILERLRRLSEENKRRIEEALRRNKKLSEDDERLSREIRRRVRELVEEAKEVLRREKDKDKLRDKLERIVDELRKLLEDNTRHSRKVSEDSKESLKDLRRHSKEVIETLEKLLEELIRKDGEETEEVKRVAEELDKLVKENRRVTEKVARELKKLNDKNREVNERLERELDKIIKDLRRTDK

SEQ ID NO: 12409 - protein, 186 aa, Artificial Sequence; identical to SEQ ID NO: 12408
  Synthetic

SEQ ID NO: 12410 - protein, 186 aa, Artificial Sequence
  Synthetic
SEIEKILEDVKKLADDLRRTLKRALEENKELSDRDKEELRRILEEIKKLAEEIDKLIKEEKDKDTLRKKVKDLEERVRELIKRLERHSREVSKESERSIRELERLIDEIVKRMEELLEKAIRDKGKDTERVREVARRIEKIIEDLRRDLERVRRELKKLNDDNRRVLEEVKRTVEEIIKRLRESAK

SEQ ID NO: 12411 - protein, 186 aa, Artificial Sequence; identical to SEQ ID NO: 12410
  Synthetic

SEQ ID NO: 12412 - protein, 185 aa, Artificial Sequence
  Synthetic
DEVDELLKEAEEVIREVTREHKRLLDEARKISEENKKRSEESNREVRELVRRIKEEIKKGLPEEDLKRLLDELRDMIRKVRETNERSDKEVEKVVRDILRRLRELNKRVEEIIRRILKEIRRDVRDSEKAKRVEEELKKLLDKLSRITEEVERRLEELLKDNERVSRESDEELKRILEDVERDTR

SEQ ID NO: 12413 - protein, 185 aa, Artificial Sequence; identical to SEQ ID NO: 12412
  Synthetic

SEQ ID NO: 12414 - protein, 185 aa, Artificial Sequence
  Synthetic
SEVEELLDRLRKLIEDVVREHKRLLDEVRRISRENEELIRRLLEKVEEVIRRIKERIKSGQPEEVIKRILDEARRRLRKVLEEIKRSDEEVEKMLRDVLKTLKELNDRVREIIKDILKKIRDKVKDEKTAREAEEELRRLLERLSEVTRKVEKAIEDILRRNRETSERVAREIRRLLKELEDTAR

SEQ ID NO: 12415 - protein, 185 aa, Artificial Sequence; identical to SEQ ID NO: 12414
  Synthetic

SEQ ID NO: 12416 - protein, 185 aa, Artificial Sequence
  Synthetic
SSVEELLERLRRISEENKRRIEKLLREVEKVLRELKDRHRKLLKRVEEIIRKVKEEIKSGLPEEVVKRVLERVRERVKEVLEEADRLNDEMRRIVTEVEKELDKSDKEVEDMVRDILKKIEEEVRDRETAERARETLKRLLDENRDRSKKVKEEIRRILEDLTRTTERVKREIKKLLKELEDTAR

SEQ ID NO: 12417 - protein, 185 aa, Artificial Sequence; identical to SEQ ID NO: 12416
  Synthetic

SEQ ID NO: 12418 - protein, 178 aa, Artificial Sequence
  Synthetic
DLLRKLLEEAKKILKEIKDAHEKLLRELEESNKELEKAHRKLLEDAKRMLDDLKRTDPREDLLRKLEELVRRIKEESKRLNREHAELVRRIEEISRRLNEELRRLVKKIEEELRRKVDDEDRVRDLRRALEELIKESDEVSRRLKEEIDRSLESSKKVSRDLEEELKKLIKDLEDTRR

SEQ ID NO: 12419 - protein, 178 aa, Artificial Sequence; identical to SEQ ID NO: 12418
  Synthetic

SEQ ID NO: 12420 - protein, 178 aa, Artificial Sequence
  Synthetic
SELEKLLRDDRELLKELKKAHKKLLDELKESNDRVRKRHEELLRRIREIAKRLRDTDPREDLLRRLEELVRRIEEDSKRLNEEHKKLIEEIERRSRKLNEDHERLSREIRERLERRVDDKDKVRRVERESKKTHDESREVSEKLRRDAEDSLRSSEKLSEDLERELRKLIKEVRDEAK

SEQ ID NO: 12421 - protein, 178 aa, Artificial Sequence; identical to SEQ ID NO: 12420
  Synthetic

SEQ ID NO: 12422 - protein, 178 aa, Artificial Sequence
  Synthetic
KDIERLLEELKRILEDLKRKHKRLLERLEDSNRRIRRTLEELLKRLEKLVKDLSDTDPREDLLKELKRLIDEIRRRLEELIRRHEELLREIKERSDELNKRLEKLVREAIDRMRKRVDDKDKVDDAKRRLEELLKESREVSKKLRDDIERSIRSLREEVKKLDEDAKRLLDKVREEIR

SEQ ID NO: 12423 - protein, 178 aa, Artificial Sequence; identical to SEQ ID NO: 12422
  Synthetic

SEQ ID NO: 12424 - protein, 178 aa, Artificial Sequence
  Synthetic
SVLEDLIRRDREMLKRAKEEHDRLRKEIERSNREIDEEVKRLLAEIKKIVEEVSKTDPREDLLREAKRLLDKIKEDLKRLLDEHRKLLRRILEESRKLNEEHRRLSREVDELLRRRVSDKKAVDEVRKESDDTHKESEAVSRDLKRELERSIKSLEKRIREAEEELKRILKELEDEKR

SEQ ID NO: 12425 - protein, 178 aa, Artificial Sequence; identical to SEQ ID NO: 12424
  Synthetic

SEQ ID NO: 12426 - protein, 178 aa, Artificial Sequence
  Synthetic
EELERLLEEDKELVRRVERELERLLRELKRSNDEIKKTLEDLLRRIEEILKEIRRTDPREDLLRTLEDLIKKIKDELDRLIKEHRDLVEEIEREARRLLDEHRRLSKEIKDRLEKRVDDKEKVKRAEDRSRETHRRLEEVVKKLKEDAERSIKSLEELVDKLRKELRRLLEEVREEVR

SEQ ID NO: 12427 - protein, 178 aa, Artificial Sequence; identical to SEQ ID NO: 12426
  Synthetic

SEQ ID NO: 12428 - protein, 178 aa, Artificial Sequence
  Synthetic
RELEELIKEDEDLLRRLAETLKKLLEDVRRSNEELRKFHEDLLRDLERLLEELRNTEPREELLRKLEKMIRDIERIARELNDRHERLVEKIRETLRKLLEEHKELSDRIREKMEREVDDKEKVRRVEERSRRTHKELEDLAREVDKELKKSIKSSRDVTRKVKEDADRLLKKVADDTK

SEQ ID NO: 12429 - protein, 178 aa, Artificial Sequence; identical to SEQ ID NO: 12428
  Synthetic

SEQ ID NO: 12430 - protein, 178 aa, Artificial Sequence
  Synthetic
SILETLADRDRDMVRRVKEALKKLLERDKRALERLKRVHKELLDRLRKILEDLKRTEPREELLKRLEDLIREIEETARRLNKEHEDLSREVRKILKELLDRHRELSKEIKEIMDREVDDEEKVKRVEEESRRTHKELKDVADRVETESDKSHEESKKVTDEVRKELERLLRELEETVR

SEQ ID NO: 12431 - protein, 178 aa, Artificial Sequence; identical to SEQ ID NO: 12430
  Synthetic

SEQ ID NO: 12432 - protein, 178 aa, Artificial Sequence
  Synthetic
SEAEKLLRELEDILKKLKDALKRLIEEDERLLKRLKREHEKLLKRLEEVLRELKKTEPSEELLRELKKLIEDIEREAERLNAEHERLSREVEKTLRKLLTDLERLIREIKKKLDDRVDDREKVKRVKDEADRLLKELEDVVREVKKRSDESHKRSRDVTREMKKELKRLLEELEKTVR

SEQ ID NO: 12433 - protein, 178 aa, Artificial Sequence; identical to SEQ ID NO: 12432
  Synthetic

SEQ ID NO: 12434 - protein, 178 aa, Artificial Sequence
  Synthetic
SELERLLREDEEMVERVERVLKELEEEVRKALKRAKEMHRRLLERLKTILDELERKEPREDLLRELETLAEEIKRILEELNKELRKLLREIEEELKRLLKEHKELSDRIKKILEEKVDDKEKVKELERRSRKTHKELADKADTLRKRLEEVIKESEDVTEELERRLKKLIDDLRRSVT

SEQ ID NO: 12435 - protein, 178 aa, Artificial Sequence; identical to SEQ ID NO: 12434
  Synthetic

SEQ ID NO: 12436 - protein, 178 aa, Artificial Sequence
  Synthetic
SELEKLLRELEELLKELKRVLEELIERDKRLLDRLKEVHERLLRRLEKLLKELKDKEPREDLLRRLKELIDKIREDAERLNEEHRRLVEEVKKELDRLLRELEDLLRRIEDILRKRVDDEDKVREAKRELERLIEELRRAVRRVEDESRRSHEESKKVTDDLDKRARELLEELRETIR

SEQ ID NO: 12437 - protein, 178 aa, Artificial Sequence; identical to SEQ ID NO: 12436
  Synthetic

SEQ ID NO: 12438 - protein, 179 aa, Artificial Sequence
  Synthetic
REVEELEKDVRRTLDELRKRHRDNNERIKKILRELEDLHRRNNERTKTLLARIRELRERGGEDKERMVKTVEDILRESTRHSERVIRESERLLEEAKRHSEEVARRSKEVLKELEDKVRESRVPRELERKLKELVKDVEKVIEDDDRSADKLLTKVKRDADEDRKSNEKLVREVREELR

SEQ ID NO: 12439 - protein, 179 aa, Artificial Sequence; identical to SEQ ID NO: 12438
  Synthetic

SEQ ID NO: 12440 - protein, 179 aa, Artificial Sequence
  Synthetic
SEAEEVLKRVEEVVERLKKLHDDNNKKLRDAVRRLKRLHTEHNKETKEIKKEIEDLIRKGGEEKEKLVERVERLVKRSTDTLREVVRRTEKLLKEVEDHSRRVIEESKELVKEMEKRLRETDVSREVEKRLKEVVKRIDEVAEEDERSIREILRELRKVIEDDERSNRKVAKEIRESAK

SEQ ID NO: 12441 - protein, 179 aa, Artificial Sequence; identical to SEQ ID NO: 12440
  Synthetic

SEQ ID NO: 12442 - protein, 179 aa, Artificial Sequence
  Synthetic
DKVREVLERLKKLVEDLKRLHKRNNEEVRRVIEEIKDRSRRNNKRTEDILRDIEREIRRGGERKEELVKRVKELLEDSTRHSEEVVREVEEILREVKRHSEEVVKESERILREAKKRLDESDVDERIKEELKKLVEDVRRTAEDDRRTIEDLVRKVEEVLERDRKSNEEAARDVDRKLK

SEQ ID NO: 12443 - protein, 179 aa, Artificial Sequence; identical to SEQ ID NO: 12442
  Synthetic

SEQ ID NO: 12444 - protein, 181 aa, Artificial Sequence
  Synthetic
RSVEEVKKELDDSDRRDREVVKEARRRLEESKDRLRKIIERAKEELDKSDERIKKNGVSEELLRRLKEVSEEHRRELERLLRRLKEVTDEHTKAIKKIHEETKKVSDDHRRAVEELRKRGGVDEELKKLLKHNREVLEDSRRKIEELLRTNEKALEDVKRAIEELLKHNEEVLKEVDDRTR

SEQ ID NO: 12445 - protein, 181 aa, Artificial Sequence; identical to SEQ ID NO: 12444
  Synthetic

SEQ ID NO: 12446 - protein, 181 aa, Artificial Sequence
  Synthetic
KEVEDAEKRLRDLLKEDRELIERLRRALEESLKEDRKVIKELREELDKSDRKVEEDGVDERLLTELRKASEEHRRKLDEIHERTREETERHKERLDKIHEDTERVARELKKRIDELKKRGGRREDIKRLLEELEEVLRRSEKKLRELLDTNRKILEESKERLRRLLEHNKRVLRRVVEETR

SEQ ID NO: 12447 - protein, 181 aa, Artificial Sequence; identical to SEQ ID NO: 12446
  Synthetic

SEQ ID NO: 12448 - protein, 181 aa, Artificial Sequence
  Synthetic
SDEERVEKELKKSDDEDKKLIDELTRRLRESLKRLEEEVRRAREELDKSDEEVRKAGVSEELLTRLEKMSREHKKRIDDLLRRAKEVTERHERKLEEIHKRTKDMSDDHRRKIEDLRAKGGVREDIERLLDHNRKVLEKSADDLRKLLKTNEEILRRVAKAIRDLLEHNRRVVEEVKERAR

SEQ ID NO: 12449 - protein, 181 aa, Artificial Sequence; identical to SEQ ID NO: 12448
  Synthetic

SEQ ID NO: 12450 - protein, 181 aa, Artificial Sequence
  Synthetic
SEVEEAKRRLDESDKDDRRVIDKLRKELEKSREEAKRLIDRLREELKDSNREAEEAGIDEDLLRKLRKATDEHRRKIEDLLRELDRVTKEHKERIDKIHEETKEMSKRHKDELEKLRARGGSREDLRRLLEHNKEVLERSKKRLEELSETNKKFLEEVKDALRELLKTNREVLREVKERTK

SEQ ID NO: 12451 - protein, 181 aa, Artificial Sequence; identical to SEQ ID NO: 12450
  Synthetic

SEQ ID NO: 12452 - protein, 181 aa, Artificial Sequence
  Synthetic
SSVERAKRELDKSLKEDRDTIRDLKRRLEESRKRDREVIEELKKILKKLLDEVKDSGISKDLLKRIEDAVRTIEEELKRIHDDTERMTREHKERIERIHDRTKKVSDEHKKTIEDLKRKGGDDDKIKKLLDHNRKVLEDSKEELRRLLETNKRILEESKKRLDRLAEEIEKVARTVKEEAR

SEQ ID NO: 12453 - protein, 181 aa, Artificial Sequence; identical to SEQ ID NO: 12452
  Synthetic

SEQ ID NO: 12454 - protein, 181 aa, Artificial Sequence
  Synthetic
DEVERAEEELRKSDEEDRRVVKRATETLKKSKDELEREIKRLEDELERSNREVEERGVDKSLLEELEKVTRDHKKRLRDLLETVRRLTEDHLEKIKKIHEDTKRASEEHLKAIRELERRGGVREEIKKLLDHNRRVLEESERRIRELLRTNREVLERVKKELDELLEHNRRVLEEVEKRVR

SEQ ID NO: 12455 - protein, 181 aa, Artificial Sequence; identical to SEQ ID NO: 12454
  Synthetic

SEQ ID NO: 12456 - protein, 181 aa, Artificial Sequence
  Synthetic
SSVEKAKKRLDESDKTDRDVIKRLREELKKSEDTDRELVKKVKEEIEKVEEELRRRGIDESLLTELKRVAEEVKETIDDIHRKTKRVTEEHTKAADKIHEETKRASKEHKERIEELRKRGGDDDKIRRLLEHNEEVMKRSKERLDDLVRTNRKILEESKRKIEKLLKELREVVEEVDRRAR

SEQ ID NO: 12457 - protein, 181 aa, Artificial Sequence; identical to SEQ ID NO: 12456
  Synthetic

SEQ ID NO: 12458 - protein, 178 aa, Artificial Sequence
  Synthetic
DKAERVREEIEKLERELRRVLKESREHTKKLEEDLERVLRRSREATKKLKEDLERNNLPDEARKRADEILKRNEDLLRRIKKTMRDVLEENERLLDKIERDLREAIKRLEEVLRDKKDDGELIKRMLEELKRLLEELEKRIRDSNAELEKLLRDLIRKLERSLREIKRVLEELKEEAR

SEQ ID NO: 12459 - protein, 178 aa, Artificial Sequence; identical to SEQ ID NO: 12458
  Synthetic

SEQ ID NO: 12460 - protein, 184 aa, Artificial Sequence
  Synthetic
SEVETLMREIKKLIDDIKRKNEDSNREIREVSRKTEEDLRDLLRKAREVAEKLKDELRRRKDKDVVERVRRLVDELRRRMEDLVRKVKEINDRLRRLVEELVKDSERLARDLERRVRSLARKIDDEEKVKRLEDSLERLKRDLRKIIKENEDELRKINRRNEELIKKAEEDLRRLSEDLKRAEK

SEQ ID NO: 12461 - protein, 184 aa, Artificial Sequence; identical to SEQ ID NO: 12460
  Synthetic

SEQ ID NO: 12462 - protein, 180 aa, Artificial Sequence
  Synthetic
SELEEVLRRIEKLVRKAHKENEDVLREIERLVRTAHRLNKKVDDDSAKIAEDLKREKREDKDKVEEMLRRLRELYRRLEEENRRILREIEELVKELEKRNREILKELEDLVKDAERKDKDGTERVRRLKEILERLKEEVRRSLEELRKEVERLKKEVEDSLRELKKSLEEWVKDLEEATR

SEQ ID NO: 12463 - protein, 180 aa, Artificial Sequence; identical to SEQ ID NO: 12462
  Synthetic

SEQ ID NO: 12464 - protein, 180 aa, Artificial Sequence
  Synthetic
SDLEAVLDEIKKLAEEAHKRNEEVDKESAKLVKEAHKVNEDVDKESAEIVKRIDEEKKEDRDKVRTMIRELKKKYEDVARRNKKILDELEEKYDRLRKDNDRILDEIRRKVEDVERKDKDGTERVKRLKDELRRLLKEVKDSLEELDRMLEEWKERVRRSLEELRKRAKEWEDKLRESLR

SEQ ID NO: 12465 - protein, 180 aa, Artificial Sequence; identical to SEQ ID NO: 12464
  Synthetic

SEQ ID NO: 12466 - protein, 180 aa, Artificial Sequence
  Synthetic
SELEDVLKKIRKLVRDAHEENKRVLEEIRKTVDEIRKELEDVDTKSAEIAERAKERKKDDKDKVRRLLEELEKLYRRLIEKVEDILRRIEEKVRDVERRNREILERLRELVERLAKEDKDGKERVERLRRELEKLVREVEESLKRLKEELDKIKEELRRILEELEEKLRRWSRELKETAR

SEQ ID NO: 12467 - protein, 180 aa, Artificial Sequence; identical to SEQ ID NO: 12466
  Synthetic

SEQ ID NO: 12468 - protein, 180 aa, Artificial Sequence
  Synthetic
SELEKVVEDLRRIVEEIERRLREVIKEIRELVRRAHERNKDVDRKSAEIVKDIEEKKKEDKDKVREMVRRLEELYRKLVEENEDILRRIEKKVRDAVETVERLIKEMRKIVEKVARDDKDGTERVERLKRALDELERRLKELVRELEDSLKKLADEVKRSLEELDKSLKDWKKKLDDELK

SEQ ID NO: 12469 - protein, 180 aa, Artificial Sequence; identical to SEQ ID NO: 12468
  Synthetic

SEQ ID NO: 12470 - protein, 180 aa, Artificial Sequence
  Synthetic
SEIERVLEEIKERVERADRKNEKVDRESAEKVKELHRRNEEVDRESAETVKRAERDKKDDRDKLRDVLRRLEERYKRLEDENKRLLKELRERYERLKKENKDILKKIRDDLRELARRDKDGTDKVREIRERVERLVKAVDESLERLERSLEEWARRLDKSLEDLKRSLKRWKEELDRKAQ

SEQ ID NO: 12471 - protein, 180 aa, Artificial Sequence; identical to SEQ ID NO: 12470
  Synthetic

SEQ ID NO: 12472 - protein, 180 aa, Artificial Sequence
  Synthetic
SELETLIKEATDLAEEVKEDLRRVDEESAKLVEDADDENKRVDEESAKIVEDLKREKKDDDEKVRRVLKELEDKYRRLAERNKRILDELDKLYKELAKRVKEVLDRIREKVKDVEREDKDGTERIRDLKEKVRRLMEDVKRLLEELERSLERWKEKVRDSLEKLKKSLEEWAKELKDTSK

SEQ ID NO: 12473 - protein, 180 aa, Artificial Sequence; identical to SEQ ID NO: 12472
  Synthetic

SEQ ID NO: 12474 - protein, 180 aa, Artificial Sequence
  Synthetic
KDLETVLEEIKRIVDDLDRRNKEVDKESAKLVKEADEKNKRVDEESAKIVKRLEREKKDDKDKVTEARRRLERTYREVDKDNKRILDELRRRYEELERRNEELLREIREKVERAAKKDKDGTDRVRRLREEVTKLLDEVRRSLDRLRESLKEWKERVDDSLRRLRDSLRKWKRKLEEATR

SEQ ID NO: 12475 - protein, 180 aa, Artificial Sequence; identical to SEQ ID NO: 12474
  Synthetic

SEQ ID NO: 12476 - protein, 180 aa, Artificial Sequence
  Synthetic
SELDDLLRRIRELVRRAEEDLKRVNEESARLVEEMDKDNKRVDEESAKIAEDLKREKKEDRDKVREVLKRLEDKYRELARRNKKILDELRKKYEDLIKKVRDIIREIDKRVKEVKDEDKDGTKKIEELKREVKKIADELERILKELEDSLREWSERVRKSLEELKDSLRRWAEELKRDLK

SEQ ID NO: 12477 - protein, 180 aa, Artificial Sequence; identical to SEQ ID NO: 12476
  Synthetic

SEQ ID NO: 12478 - protein, 180 aa, Artificial Sequence
  Synthetic
KDLERVVKEIERLVREAEKKIREVNDRSAKLARDLDRRNREVLKEIKKIAEDLEREKKEDEKAVRDLLREIRKKVEDVKETNERILRKLRKEYEELRREVKKILEEIEKLVRDVERKDKDGKERVERLKRELERLKRELEETLKRLDEELEKWEERVRESLKRLEDRVREILKRLEDDAR

SEQ ID NO: 12479 - protein, 180 aa, Artificial Sequence; identical to SEQ ID NO: 12478
  Synthetic

SEQ ID NO: 12480 - protein, 180 aa, Artificial Sequence
  Synthetic
DELETVMKRIRELAKELNKKNKDVLDEIEDLVRKADKRNKEVLKRIEEILREARKRKKDDKDRVREVLEEIKREVKKLERENEEILKRIEDTLRELERDNERILEEIRRLVEDAERKDKDGTERVKRLKDELRRLIEEVRRNLKRLKEEVDKIRERVRRSLKKLKEDVKRLSDEVKETLK

SEQ ID NO: 12481 - protein, 180 aa, Artificial Sequence; identical to SEQ ID NO: 12480
  Synthetic

SEQ ID NO: 12482 - protein, 182 aa, Artificial Sequence
  Synthetic
KEIEDLLRELRELVKEIDDLIKDATREIERLVKEVHDKNEKVTRRLEKLMRELREVARRGDLRDDDIRKAIREMEELSKEVEDTNRKVIEDLRRLSERLEEEVRKLIRRAEELVADIARKRGRDERIETLERALRELVRELEEKVDEHRKRTDKVARDLKKSVDDHRRRTEELVRELRKTEE

SEQ ID NO: 12483 - protein, 182 aa, Artificial Sequence; identical to SEQ ID NO: 12482
  Synthetic

SEQ ID NO: 12484 - protein, 182 aa, Artificial Sequence
  Synthetic
SELEDVLRRAKKLVEDVHRDNKRVTEELEKLARELHKKNEDVLRELKKLADDLREMLKRGDLREEDIKRVRTEIRKLLEDVRETNKRLIERIKDLSERVREINEEVIKEMEELLEDLRRRDGDDEKVKRLEEEIRRLARELRESVRRHKERTEELVERLKESLKKLEEDIRRLEKELEDDRR

SEQ ID NO: 12485 - protein, 182 aa, Artificial Sequence; identical to SEQ ID NO: 12484
  Synthetic

SEQ ID NO: 12486 - protein, 182 aa, Artificial Sequence
  Synthetic
SDLDDVLRRIRELAKRVHDENKRVTEELERLVEELEKKARELLRRIEELVRTLKEMRERGDARREEIEKVIEDIERLVRKIEDLIRKLIERARRLSEEVEDINRRVIEELRELVRELERRTGEDERVERLRRELEKLVKELEESVRRHKKRTRELEERLKDVLRELEDAVRRLVEELEKTDE

SEQ ID NO: 12487 - protein, 182 aa, Artificial Sequence; identical to SEQ ID NO: 12486
  Synthetic

SEQ ID NO: 12488 - protein, 182 aa, Artificial Sequence
  Synthetic
EEIERLLEEIKRLVETVHESNRRVLKELRDLAEELKRRNTKSNRDMERLVEELEEMRRRGDAREEVIRRVIEELKELLDRLHKDNRDAEREVERLVREVKRENDDVIRRIEELVEDLRRKRGEDEKVKTARDEVRRLVEELKESVERLARELKKLVDELRKVDEDNKRRLEELERRLRESTR

SEQ ID NO: 12489 - protein, 182 aa, Artificial Sequence; identical to SEQ ID NO: 12488
  Synthetic

SEQ ID NO: 12490 - protein, 182 aa, Artificial Sequence
  Synthetic
SELEDVLRKLEKLAREVDKINKDLIKRVEELARELKKKNEKSNKEARDLVKKLKEMKDRGDLRREDIDRVEKRLEKLLKELHEENKRVIDEIRKLLEEAEETNRRVIEEIKKLVKELEDRDGDDERVRRLKKEVEELERRLRRSVDDLRRKIKELEDRLREIDERNKREIEKLVKELRDTDR

SEQ ID NO: 12491 - protein, 182 aa, Artificial Sequence; identical to SEQ ID NO: 12490
  Synthetic

SEQ ID NO: 12492 - protein, 182 aa, Artificial Sequence
  Synthetic
DELETVAKLLEDLSRTNEDRLREVKETLKRLADTVDKINKEVLRRLRELAKRLKELKERGDLREEKIERVKEELERLVDKVRKENKEVDDEVRRLVDEVRKHSKRVIEELRKLVDDLRRRRGEDEDVRRLEEELRKLEERNRRLVRELEEVLKKLKDELKKSVDRLKEELDRLVKELDEIKK

SEQ ID NO: 12493 - protein, 182 aa, Artificial Sequence; identical to SEQ ID NO: 12492
  Synthetic

SEQ ID NO: 12494 - protein, 182 aa, Artificial Sequence
  Synthetic
SEIEDALRKMEKLAEDVNRKNEEVIREVRRLSEENKKKLDDVLETLKKLVRELAEMTKRGDIREEDIKRVIREAERLVKELDDHSKEVIKEIKERLRRVEEENKRVIDEIKKLVKEIVDKEGRDERIRTLEKAVRDLVRELEESVDRLRREADRLVEENERVVERLKRELKRLVEELERRAK

SEQ ID NO: 12495 - protein, 182 aa, Artificial Sequence; identical to SEQ ID NO: 12494
  Synthetic

SEQ ID NO: 12496 - protein, 182 aa, Artificial Sequence
  Synthetic
DELREVLERVKRLVDTVNKINDDLTKRNEDLSRKNVDKIRRLTEEIERLVEEVDRARREGRLREREIEKVIRRSKKLSEDLKKHSEDVIRESDELLKDAERVNREVIKEIEELVRDLERRRGRDEDVRRLEEEVRKLVEELRRSVEDHKRRNKESVDRNRRAVEEHERRNREVVERLERKAK

SEQ ID NO: 12497 - protein, 182 aa, Artificial Sequence; identical to SEQ ID NO: 12496
  Synthetic

SEQ ID NO: 12498 - protein, 182 aa, Artificial Sequence
  Synthetic
SDIEEALKTMEELSRRNEETLRRVLKRLKELADEVNRKNERVLEEAKELADRLRELRERGDLRKEDIDRVIREIERLVKEVADTNKKVIEEVKRLVERLEEHSREVIRRLEELLRDIRRKKGDDERIKTLEEDLRRLVEENKKVVEELKRRLKKLVDELRESLKELEKAVRKLVKELRDDEK

SEQ ID NO: 12499 - protein, 182 aa, Artificial Sequence; identical to SEQ ID NO: 12498
  Synthetic

SEQ ID NO: 12500 - protein, 177 aa, Artificial Sequence
  Synthetic
SSKETVAKRVEDVKRELEEVLKELARESKRLSDRDKKLNEEAAEEIERLKDELRKKVRDKDTLEEVLRRLEELLRRLNEHSRDVIRRSEDSLRKAADFVRRLKETADKLLEELKRVDDDEVLERIVKRVRDLVEEIKRRLEKLAEDNRRLSKRNEDVIRTLLEEARKLVEKVKEEVR

SEQ ID NO: 12501 - protein, 177 aa, Artificial Sequence; identical to SEQ ID NO: 12500
  Synthetic

SEQ ID NO: 12502 - protein, 177 aa, Artificial Sequence
  Synthetic
RSKEEVAKEIKRLKEENKRLLDELAKRSEELERRDRRLNEEHHREIRRLTDELRKKVRDEDTLREVEERVRKIDEDVNRHSEEVIRESRESLKRVADHSRKVVEDLERLLEEAKRVDDDRVLKEIVDEARRLSERNEEVLRRLLKENEDLSKRNEDFIRKTMKELRDLAEEVKERAK

SEQ ID NO: 12503 - protein, 177 aa, Artificial Sequence; identical to SEQ ID NO: 12502
  Synthetic

SEQ ID NO: 12504 - protein, 177 aa, Artificial Sequence
  Synthetic
KSKEDVKREIERLKKENREVLDTARKRIEDLIREDERVNREAAEEIKRLVEELERRVRDREELRKVTEELKKLLEDLNRHSEEVIRTLRKLLDDLRKHSEEVERRLEKLLEELKRVEDDRVLKEIVEELRRLSEENKRRIERALEELEKLSKDNTDRIEEAREDLRRLVRELLEKEQ

SEQ ID NO: 12505 - protein, 177 aa, Artificial Sequence; identical to SEQ ID NO: 12504
  Synthetic

SEQ ID NO: 12506 - protein, 177 aa, Artificial Sequence
  Synthetic
KDEEEVAKEIERLKEENDRVLKEAADKIEKLKKENREVNTRAAEEIERLKKELREKVRDKDLLRKLEEELRRLLEELKEHSERVERELEKLLEDLARHSEDVKRRLDEILEELKRVRDSRVLEEVVRRLRKLSEENKKRIKEMLDDVERLSRRNEEKIRRVLEDARRLLEDLTRKAK

SEQ ID NO: 12507 - protein, 177 aa, Artificial Sequence; identical to SEQ ID NO: 12506
  Synthetic

SEQ ID NO: 12508 - protein, 177 aa, Artificial Sequence
  Synthetic
SEKETVAEEIRRLIEKNKKMLEDHTRDIRRLEKENDDVNRKHHEDIRRLKDRLRKEVRSEETLRDLTKKVEEIDEEIKRHSEEIKRRLREINKELKEHSDRVVERLRKLLEDAKRVDDSRVLKEIVDEARELSKRNEDKIRKSLEELKRLSERNKKKIEDTLKELRKLAEEVKRRAT

SEQ ID NO: 12509 - protein, 177 aa, Artificial Sequence; identical to SEQ ID NO: 12508
  Synthetic

SEQ ID NO: 12510 - protein, 177 aa, Artificial Sequence
  Synthetic
SEKERVADDIRKLEEENKEVLDRAAEEIKRLKKRDRELNKRHHKTIRDLVDELEKKVRDEETLRRVKERMREIDERVKESSKRVEDELEKLLEELKRHSEEVVRRLRELLERLKRVDDSRVLDEIVKEARDLSEENRKLIEEALERLRRLSRENEETIKKTMEELKRLVEEVKERAR

SEQ ID NO: 12511 - protein, 177 aa, Artificial Sequence; identical to SEQ ID NO: 12510
  Synthetic

SEQ ID NO: 12512 - protein, 177 aa, Artificial Sequence
  Synthetic
KSKEEVADKIRKLKEENRKVLERHTREIEKLKRDDEEANKKHHEDVKEVMKRLEKEVRDKDTLEKVKREAKKIDEDLRKSSEEVMRTLDEINKDVARHSKEVAERLEELLERLKRVDDDRVLEEIVREAEELSKRNKDRIDESLKELRKLSEDNKREIERTLEEIKRLAEEVRRRDT

SEQ ID NO: 12513 - protein, 177 aa, Artificial Sequence; identical to SEQ ID NO: 12512
  Synthetic

SEQ ID NO: 12514 - protein, 177 aa, Artificial Sequence
  Synthetic
SSKERLKEMIDRLKERNKDLLRKAAEEIKRLEDEDREVNRRHHEEIERLKKELREKVRDKDTLKELEERVEKIDEDVKRNSKRVVETLRELLKRLADHSKRVLEELDRLLEELKRVDDDRALDEIIKEAKKLSDDNERLIRDVLRRARDLSRRNKETIRRTLEKLKREAEKVKEDAR

SEQ ID NO: 12515 - protein, 177 aa, Artificial Sequence; identical to SEQ ID NO: 12514
  Synthetic

SEQ ID NO: 12516 - protein, 185 aa, Artificial Sequence
  Synthetic
SDADRIIEEARRLSEENKRRIEEVLKRNRKLSKENHDKNDELLKRVRELLRRVVERLRREEGREEIKKLVEELEKELDKILEESRRSTEEVKDESRRLLEEIRRSTKEVKKTLDDLLRKVRERVRDKDKLKRLEDEVRKLTDENRRVTEKAERDLRRSNRENDRSTERLEEEIRRIKKRLRDEAR

SEQ ID NO: 12517 - protein, 185 aa, Artificial Sequence; identical to SEQ ID NO: 12516
  Synthetic

SEQ ID NO: 12518 - protein, 185 aa, Artificial Sequence
  Synthetic
REAEDLIRRLRELVRRHHELNRKLAEELRKLSEENKRKIEKVTREVEKLVKDVADTLKDDRGDERLERLVKELKDRLDELVKEIERSTREVERRMREVLKRSRDSAREVEERVERLLEEVRRRVRDKDKLKRLEEELERLKEEVRKSNRDLEKEVRDLRKENEKVTEEVKKRIEDLKRKLDEDRR

SEQ ID NO: 12519 - protein, 185 aa, Artificial Sequence; identical to SEQ ID NO: 12518
  Synthetic

SEQ ID NO: 12520 - protein, 185 aa, Artificial Sequence
  Synthetic
SEVDKIIKDARDLLKEHHEKNKRLIEENRRLSEENKDRIRRALEKLKKLVDDLRRLIEEVDDRDTLRELVRRVERTLDELLKDIERSTDEVRRESERLLEESRRSAEEVKRRLDELLKEVRRRVRDKKKLDELETEVRRIKETIDRSNERLERELEKSNRENKKVTDDAREVVKKLKEEIKRDED

SEQ ID NO: 12521 - protein, 185 aa, Artificial Sequence; identical to SEQ ID NO: 12520
  Synthetic

SEQ ID NO: 12522 - protein, 185 aa, Artificial Sequence
  Synthetic
SEADEIIKEAKKLADDHHRLNKEIIERNKRLSEENHKLNEKIIEDVRRLVKDVAERLKRDEDRRDLDRLVDEVREELRRLLEESERSTEDVKRESKRLLDESKKSAEDVKRDLDRLLKEVEEKVRDKEKLDRLREKVEEIKRRVDKSNDELRRSMEESNKRNDESTDRLREELRRLDEELDRRRK

SEQ ID NO: 12523 - protein, 185 aa, Artificial Sequence; identical to SEQ ID NO: 12522
  Synthetic

SEQ ID NO: 12524 - protein, 185 aa, Artificial Sequence
  Synthetic
SDLERVLKELRELVRRHHELNKDIIRRARRLSEENEKDIKKLLDDARKLLEEVKRTLDRMEGKEEVDKLIEELERRLDKLTKRLEDSSRDVKRRLRELLKRSEESAREVKKTIRKLEKELTERVRDKKKLDEARTELRKLEEEVDKSNKELRDEVEKLERRNDELLERAREEVERLKEELRRKAT

SEQ ID NO: 12525 - protein, 185 aa, Artificial Sequence; identical to SEQ ID NO: 12524
  Synthetic

SEQ ID NO: 12526 - protein, 185 aa, Artificial Sequence
  Synthetic
SKAERIIEEVRRLSEDNKRRIKKLLDEAKELLDRHHKRNKELLEEIERLLREVKERLKKDRGRDRIRRLVEEAKKRLDEVLEDSKRSARELKKTLDELLKRLEKSSEDVERRLRKLEDDVRREVRDKDRLEELRRDLERLRKENKDVLDRVREDIKRLKEELDDSNRRLKDTIEDLKRELDEEAR

SEQ ID NO: 12527 - protein, 185 aa, Artificial Sequence; identical to SEQ ID NO: 12526
  Synthetic

SEQ ID NO: 12528 - protein, 184 aa, Artificial Sequence
  Synthetic
SEVEELVKDLKRILDEIKRTNDELNKELKRLSDESRKLSKENIDRLRRILEEIEKTIRRRKTEEVKRRIEELVERMRRSSEEVVRRIEKLNEEANRKVEKVKRENKELLERAERKVREVAKRIKDEEKVRKLEKLLEDIKRTVDKIIRESEKRAEEINRDNRRIIEENKKKLEEIARRVEELAR

SEQ ID NO: 12529 - protein, 184 aa, Artificial Sequence; identical to SEQ ID NO: 12528
  Synthetic

SEQ ID NO: 12530 - protein, 182 aa, Artificial Sequence
  Synthetic
SSIEELAKRLEDLIRELRDRHRRLNEELKELTDRNRKEIEEANERIKRLIDDLERLRRRGDIDEKRIREIIKRIRELSKEIEKRSEKIIRELERLVEELAKETEDIIRRARELVEAIRKERGDNEEIDKLRRELERLEEELKKVLDRTREELERLVRDNRRLNKEHKDHSDTLVRRLEESRK

SEQ ID NO: 12531 - protein, 182 aa, Artificial Sequence; identical to SEQ ID NO: 12530
  Synthetic

SEQ ID NO: 12532 - protein, 186 aa, Artificial Sequence
  Synthetic
SEVEDLIRDLERLLKEHDELNKRSMEELEKLLKDLEKMVRDSLREAREIAERVKETIKRTSDKEDLRRRLKKVKDDLDESHKDLARLLKEIEERIDRILRENERHLEEIKREIKKILEELERAKKGEEKKLDEARKVLEEIKKRLEDSLRRLREEAERIKRELKRILDEHRKEIERIKKEIDEAAR

SEQ ID NO: 12533 - protein, 186 aa, Artificial Sequence; identical to SEQ ID NO: 12532
  Synthetic

SEQ ID NO: 12534 - protein, 186 aa, Artificial Sequence
  Synthetic
SEIEKVLRDVEKLVREHEDLNKKSAEEAERLTRDNKRRVDESKKRIREILKEVDEIIRRTERKEDLERKLTEVRRRIDKSHKELKEHSDEVVKRLKEILDRNAEHLEEIERRIDKILDDVRKRKQGDDKDLRRLAEEAERIKKRLRDSLDELRKIIEELEERNRRINEDHRRDLEDVKRRIEEKSK

SEQ ID NO: 12535 - protein, 186 aa, Artificial Sequence; identical to SEQ ID NO: 12534
  Synthetic

SEQ ID NO: 12536 - protein, 186 aa, Artificial Sequence
  Synthetic
SEIEEVARRAEKLTKENEELIRRSLRDIERLVKEMEDIVRKSLKEIKELVERLKDISRKTSRKEDLRRIIEDIKRKIEESHKRLAELLRDIVRKIRESHERVNKHSKEVMERLDRLLEEVEKAKKGEDEKLRRLAKRIEELKKRNEDLNREHRKRLEEAEKRLKDVLDEHRRRLEEVKKELDEEAK

SEQ ID NO: 12537 - protein, 186 aa, Artificial Sequence; identical to SEQ ID NO: 12536
  Synthetic

SEQ ID NO: 12538 - protein, 186 aa, Artificial Sequence
  Synthetic
DEIERVLEEIKKLTDDNRKLVKESIDRAEELLKRHEEENKKSVERARKLVRDLDEIRRKTDRKEDLRRIIKEVREELKKILKENADHAREIMRRLEESHKRLNEHSKRVVEEIRRLLEEVKKAKKGDKKKLDELARRAEDMERDNKRINKEHRERIKEIKERIKESLDRLAEEIKKIEKELEDKAR

SEQ ID NO: 12539 - protein, 186 aa, Artificial Sequence; identical to SEQ ID NO: 12538
  Synthetic

SEQ ID NO: 12540 - protein, 186 aa, Artificial Sequence
  Synthetic
SEIEKVLEDAKKLTKENEDLIRKSLEDNERLLRRHEEENKKSAEDMRDLLRRLEDIIRKTSRKEDLERIIREVIETIRRILKRNAEHAEEVIERSRRSHEEVNRHSKEVIDTLRKLLEEVREAKRGSEELLERLAREIKKLIDKNRKLNEDHRRESEKSERRLRESLRKLAEEAERIEREMDKSRK

SEQ ID NO: 12541 - protein, 186 aa, Artificial Sequence; identical to SEQ ID NO: 12540
  Synthetic

SEQ ID NO: 12542 - protein, 184 aa, Artificial Sequence
  Synthetic
SKIEKIVRDAERLLDELRKLAEDVLRRLEELNRRAEDVIRRLAEENTELLKRLEDLLETEKTADEKLKRAVEKLEKASEESVDRLRRLIEELKKEHKRLLEELERVVKKVDDDLKRLTKEIEGTDKKKAEELKRKAEEIKRRIDKIVDEVRKAIRDSAEHLKRLLEEYRRRVEEVKKRVRDAAK

SEQ ID NO: 12543 - protein, 184 aa, Artificial Sequence; identical to SEQ ID NO: 12542
  Synthetic

SEQ ID NO: 12544 - protein, 190 aa, Artificial Sequence
  Synthetic
DELERLREEVKRLSEENKELIKEMEKRNRELSKENEKVNRELKKRVDDIIRTLKELRKEGRDEETLTRMLDRVRKELKRLKEENKKILEDLRRRSEELARRLERADEELKKRLEDLARDLKRKLKDGDEKEEREIRRVLEDIKRIADENERENREALKRLEETNKRNTDHNRDVLREIDKLFREVAEELR

SEQ ID NO: 12545 - protein, 190 aa, Artificial Sequence; identical to SEQ ID NO: 12544
  Synthetic

SEQ ID NO: 12546 - protein, 180 aa, Artificial Sequence
  Synthetic
SEKEEVIKRIREELKENEKENRDVIRKIRELLDELRRRVEEVLRRLKKSNEDIEREAEKKPRTEELKKLLDEVKERSKELTERLREALKEAAKVVERVVEEIKRINDELRKRIERLEEKLDEVREEELKERIKKLSKENKDRVRRMLERIKKLVDDLRRLLEELRRRNEKLLDRLRKAIK

SEQ ID NO: 12547 - protein, 180 aa, Artificial Sequence; identical to SEQ ID NO: 12546
  Synthetic

SEQ ID NO: 12548 - protein, 180 aa, Artificial Sequence
  Synthetic
KDEEKVIEDIRRILEENHRENKEVIDKIRELLRRNEEENKEAIRRMRKSNKEITDRAEEKPQTEDLRRLIKEAKDESDKIIRRLEELNKRLRDAVRELEKKIKEINKELKRRIEELERRLDKIRREELERRVRELSKENKEMLKRVEDKIRELSERNKRTVKKVREDNERLIRRLEEEDK

SEQ ID NO: 12549 - protein, 180 aa, Artificial Sequence; identical to SEQ ID NO: 12548
  Synthetic

SEQ ID NO: 12550 - protein, 188 aa, Artificial Sequence
  Synthetic
SELERIEEDVERLNRRNEETLKRIDEALKRLEKSNKELDEKLEETVKRIKDRVERVKRRNVDEEDLRRLDEEIERTLRELKKELDEHLRRVEDTLRRLKTESRRLLKEIKDRLEEIEKEEADGNLPDKAKREVDKVRTDAREILKENKRRNEDVIRKIEEKVRDLERRNRDLLRRVKTKIDRLREELK

SEQ ID NO: 12551 - protein, 188 aa, Artificial Sequence; identical to SEQ ID NO: 12550
  Synthetic

SEQ ID NO: 12552 - protein, 186 aa, Artificial Sequence
  Synthetic
KELEDIARRVDELNKRNEELIKDAKRVLKEASDKNKEMNERVDDKLRRLAKKVKELTGTSEEMVERLKRELETVKEKIRKESREILEELKEVLKDLERRMRKLEEENKTVLREIEERLRKRNGGKEERDKIRDLLRRIREKIEKNRKDAEDVLREIKKLIDENKKRNEEVLKKIEELLRELEKRLE

SEQ ID NO: 12553 - protein, 186 aa, Artificial Sequence; identical to SEQ ID NO: 12552
  Synthetic

SEQ ID NO: 12554 - protein, 182 aa, Artificial Sequence
  Synthetic
SRLEKVIKEIKKTHEELERRFKKNSDEAEESLKRLEDELRKVVTDIERKLRDLERRVREAGRRREELEKLAEDLKETIERLRKEVKELMDRHRDVNREIEERLRRLARENEERLRKADEKPRSEELITRLKKHVDDTAREVEELIKRHTEHNEKLRRDIKKLLEELKRKVDELRKEIETRTR

SEQ ID NO: 12555 - protein, 182 aa, Artificial Sequence; identical to SEQ ID NO: 12554
  Synthetic

SEQ ID NO: 12556 - protein, 181 aa, Artificial Sequence
  Synthetic
SELEELIKRAEDTIRRLEREIDELIERHRRSAERLRETLKELIDRHRKSIEDVMRELKRRRGRVPDEVKRTLEKSKRDLDRLAEELEKTLKESEEELKRLKDRLKETLDKLREDLKELAKRGRTGKEEIERLIKELEKKIKEVVKRIRDIDEDLKRKAKKVVDDLRELNERLERKAKEATK

SEQ ID NO: 12557 - protein, 181 aa, Artificial Sequence; identical to SEQ ID NO: 12556
  Synthetic

SEQ ID NO: 12558 - protein, 185 aa, Artificial Sequence
  Synthetic
SEEERLRDHSRRVEELARRAAEKLRRHSEDVKRLITELIKLIEDVMKKIEDEVRDAEKRGDTDETLVKRIEELVTRLEKTLRDMTREIRRSHKELEDTVRRLVEELKRSNKELKKEIDEGDLRDELKKRIDELHKRNKDKLDEISERLKRLLEENRKLIKEVEERLRKLLEDLRKLIEDVKRRLR

SEQ ID NO: 12559 - protein, 185 aa, Artificial Sequence; identical to SEQ ID NO: 12558
  Synthetic

SEQ ID NO: 12560 - protein, 185 aa, Artificial Sequence
  Synthetic
DFEEEIRRNLKRVRDLAKKLEDLIRKHSEEVKRLAEEVKREIEEVIKRAKKKMEDVRRDGDNDETLLRELERTLRELERKLRELSERLRRSNEKLKRDLKRVRDDLKRSHDDLERRIREGDLRDELKKRADRLLDEHREELKRIEDRLRELLERNNRLLEDIDRRLKELLEDLRRVLKEIEEELR

SEQ ID NO: 12561 - protein, 185 aa, Artificial Sequence; identical to SEQ ID NO: 12560
  Synthetic

SEQ ID NO: 12562 - protein, 186 aa, Artificial Sequence
  Synthetic
SEVERLLEDLRRLAKESDESLKKSHRELRKRHEEVRRTIEELLKDLERTVKEIKEELERDVKDEKKLKELEDRLRELIERLRELMKRLTDESRRNLEEDKRLLEEYREALKKLEEELKELRRAGLPEEDVRREIKRVLDTIRKLNEDWKRRNEESKRRLDKLLDDAKKAIDKIVEDVKKLLEDARR

SEQ ID NO: 12563 - protein, 186 aa, Artificial Sequence; identical to SEQ ID NO: 12562
  Synthetic

SEQ ID NO: 12564 - protein, 186 aa, Artificial Sequence
  Synthetic
SEVEKLLRDLERLARRVREELRKSHEKLDKLARDSKKSIEDLLEDLRRIIEEIEEELDRRVRDKDKLKRARDELRRLIDELRKIVEKYEEELKRLKKEDRDTLKDVDDKLRDLRRRLKKLREDGLPREDVEREVRRIKREIKELLDRWRRANEEIAREIRKLNEEVKRRVEKILRDLEELLRRLRK

SEQ ID NO: 12565 - protein, 186 aa, Artificial Sequence; identical to SEQ ID NO: 12564
  Synthetic

SEQ ID NO: 12566 - protein, 184 aa, Artificial Sequence
  Synthetic
SELEKLEKELKDLLDKIRRDLEKSLKENDELVKKIEEDLKDLLKKLDDRLEKVARDLKREKSGREKELEDLRRELEKIKEELKDELRRLKDENRKSKEDNERILKKLEDELREIERRLREAKIERETATKRVKEVLDKLRKMLEDLRRHNEENKRRNKEVLDELRKKAEDVLRRIDEALKELKR

SEQ ID NO: 12567 - protein, 184 aa, Artificial Sequence; identical to SEQ ID NO: 12566
  Synthetic

SEQ ID NO: 12568 - protein, 183 aa, Artificial Sequence
  Synthetic
SVEEMETRLKEVADDLKKKIDEVLTRLEKLNRELTKRSRDMNRELERLNKEAEDRARDVLKRVDKDTLKRELEELKKHVKEVKDRSREIEEKLRRHLDEVRKRVEELKRRLDDTLRRLRERQVDRDEARKLLRDLERLIEEIKKTLDELLKHHKEELDRIDREHEELLRHHKKTLERIEEKID

SEQ ID NO: 12569 - protein, 183 aa, Artificial Sequence; identical to SEQ ID NO: 12568
  Synthetic

SEQ ID NO: 12570 - protein, 176 aa, Artificial Sequence
  Synthetic
DRVEKVLREIEKRLRDHRKRLKDALDEIRKRIEEHEEKSERLNRESKKLLKDLEDMKRRGDLDEDTVRRLEEENKKLLDELDKHLKRLKEEIEKLLRDLNRHLEKLKEDIKRLEDEVNIDEEVVRRARELVKRLEEDHRRMVEEIRRTIKRAEERHKKSVEDNEKLLRDLRDRLEK

SEQ ID NO: 12571 - protein, 176 aa, Artificial Sequence; identical to SEQ ID NO: 12570
  Synthetic

SEQ ID NO: 12572 - protein, 176 aa, Artificial Sequence
  Synthetic
SEVEKVLEDLKRLLDEHEKRSRELNKRSKKLADEARRINEELLRELKKLLDELKELKDRGDLDERTVEELRKTAEDINRRNKEMLKKLSDENEKLLDELNKHLEELERRVRELERDANVDKKFLDDMRRLLEELKERHERSERENRKLLRKLEEDSKRTNDESKKLLDKLRDDLEK

SEQ ID NO: 12573 - protein, 176 aa, Artificial Sequence; identical to SEQ ID NO: 12572
  Synthetic

SEQ ID NO: 12574 - protein, 176 aa, Artificial Sequence
  Synthetic
DRVEEVLKRVEELVKRHDERLKELEDDLRRLIEEHLEKSRRLNKESEKLLKEILEVKRRGEADEKVAEDVERRNEKLLRELNEHLERLERTAKKILEEIDDHLRRLEEEIERLKRELNLSEEVVKTIDEIVKELRKRHEEVRKRLKELLDEMRERHERSVRRNRERLEKLLDDLRK

SEQ ID NO: 12575 - protein, 176 aa, Artificial Sequence; identical to SEQ ID NO: 12574
  Synthetic

SEQ ID NO: 12576 - protein, 176 aa, Artificial Sequence
  Synthetic
SEVERVLRDVERLLEEHRKKSKEANDTSRELARRHKEESDRLNKKSEDDARRLEDVKRRGEVDEEKLKELSKRNKKLLDDLNRHLEKLKEDNERLLRELDEHLRRLEETIKKLERDVNIDEDMVRRIREIVKKLKRDHEKSVEDNRRLLRELEERHRESVERNEDLLRRLEERARK

SEQ ID NO: 12577 - protein, 176 aa, Artificial Sequence; identical to SEQ ID NO: 12576
  Synthetic

SEQ ID NO: 12578 - protein, 176 aa, Artificial Sequence
  Synthetic
DEVETVLRDLKRLLDEHRRRSEELNKRSEELLREHEERSKRLNERSEKLARELREMKKRGEVDEETVKDLARENEELLRRLDKHLEDLERENKRLLRDLDRHLEELKKTVEDLKRRANVSEEFVKRMDELLRKLEEDHRRSVRENEKLLEELRRRHKKSVDDNRRLLEKLKRDADR

SEQ ID NO: 12579 - protein, 176 aa, Artificial Sequence; identical to SEQ ID NO: 12578
  Synthetic

SEQ ID NO: 12580 - protein, 176 aa, Artificial Sequence
  Synthetic
DEVEEVLRRIEELLTRHRKKSDDLNRRSEELAERHERTNRTLLEELRDLAKKLEDLKREGKLDERTVEELKKRAEKINRENKKHNDELRERNKRLLRELDKHMRELEERIRKLEKDVKVDEEVVKRMRDLVRRAKEEHKKSVDDNRRTLKELHDRSKKTNDDSRELLKRLEDRLRK

SEQ ID NO: 12581 - protein, 176 aa, Artificial Sequence; identical to SEQ ID NO: 12580
  Synthetic

SEQ ID NO: 12582 - protein, 176 aa, Artificial Sequence
  Synthetic
REAEEVLERIRRRLEEHLEDNERILREIKKRLDEHREKSKRVNDRSRELVERLLAVKREGKVDEEKVERLKKENEDLLRELDKHLEELKRRIRKLHEDNRRHNKELEDEIRRLEREANLSEDIVREIRRIVRELHERSKDSNREVERLVRKLEDDHRESVERNRELLKKLEDDLRR

SEQ ID NO: 12583 - protein, 176 aa, Artificial Sequence; identical to SEQ ID NO: 12582
  Synthetic

SEQ ID NO: 12584 - protein, 180 aa, Artificial Sequence
  Synthetic
RLEDVLREVREDLRRLNEESRKVLEENDKLDKDLNRRLKRLEEEARTEIKKVKDRLRDDEELKRLEKELEKILDRLRREVRKLNERNREELERLDKADKDINRELKRIEDEVKKLKERVDEDELEKRLTEVRKELEDRYRELIERSKDIIRRLEEEVRKLEKELRKVLEDLDRRAREATR

SEQ ID NO: 12585 - protein, 180 aa, Artificial Sequence; identical to SEQ ID NO: 12584
  Synthetic

SEQ ID NO: 12586 - protein, 177 aa, Artificial Sequence
  Synthetic
SEREDIKRLIEEIRKLVDEAAKEIERNIEEIRRLVKELEELSKKHIDEAREILERLKRRDDKKTIDEATERLRRSHKRLEERIREVKKRIDESHEKLREDLETLIREIRKLLRELRERTGDTELVEEMERDVREVERALRRLLDKHRRVLEDVERRLRRALEENRRVLEEIEEDSRR

SEQ ID NO: 12587 - protein, 177 aa, Artificial Sequence; identical to SEQ ID NO: 12586
  Synthetic

SEQ ID NO: 12588 - protein, 181 aa, Artificial Sequence
  Synthetic
KDEEATKKLRKAHEDSERHIKKLSEDTKKVHEESDRHIRKVSKETEDEARRIEKELRKLPDREELRDVMRRLKELLKTLREENERVRKRSEDLLRELEKRNKEVADESRKLLRDVEEALERGEVDEDTLEKIIEENKRLNDELAKENKEVIKENRKLNRELEERNKEVIDRMERILEETKR

SEQ ID NO: 12589 - protein, 181 aa, Artificial Sequence; identical to SEQ ID NO: 12588
  Synthetic

SEQ ID NO: 12590 - protein, 181 aa, Artificial Sequence
  Synthetic
REEELKREMEKAHEESERHLEELSRKTRDVHRRSEEHLKRLHERTKEVVDRIVEELRRLPKTDELRKVIEELERLLRTLKKENEDVRRESEELLKRLEEENKRVLKESRDLVRKVEEALRRGEVDEETLRRVIEKNRKLNEDIAKRNEEVIETNKKLNEEIARRNEEAIKTARKIVEDTKR

SEQ ID NO: 12591 - protein, 181 aa, Artificial Sequence; identical to SEQ ID NO: 12590
  Synthetic

SEQ ID NO: 12592 - protein, 181 aa, Artificial Sequence
  Synthetic
REKEVVDRLREEVRRVEEEVDRLNKELEEIARKVERELDKINEDYKRRLDKVREDIKRLPKTDELRTVEKRSDDHARELHKRSEEIKRDIRRRLKELHDRSREIKKTIRDLLRELEEMMRRGDVDEETVKRILETARELLDRWKKEVDEIVKTLEELLDRWRKEVERVKRENDKLLEELEK

SEQ ID NO: 12593 - protein, 181 aa, Artificial Sequence; identical to SEQ ID NO: 12592
  Synthetic

SEQ ID NO: 12594 - protein, 181 aa, Artificial Sequence
  Synthetic
DEKKVLDDLRRIVEKVKRDLDELLKDNRRVLREVEEELKRLNEELRRIAEEVTRELRRLPRTRELERIEKEIERRLKELHERSDELRRRLRKLHDELREKLERLKKRMEDLLRTLKDLVDKGDVDEKLAEEVARELRRLLREAEETSRDTKRKLREVLREWRELVKKIVDEMRRLLEEIKR

SEQ ID NO: 12595 - protein, 181 aa, Artificial Sequence; identical to SEQ ID NO: 12594
  Synthetic

SEQ ID NO: 12596 - protein, 179 aa, Artificial Sequence
  Synthetic
DLERLVEEIKRRLRELLKELHKKSKEIEEEIRRILKRHHELLERIVRRLEELVEEVKRRNSDDDTVKKRVKEEIDRLLEDYKRHLEEVERLLRKLLREYEEKVKEIEKEIRKLKKRLEEAGVDKKLLEDLEREIEKVKKAARDDLRRLEEIVRDVERRLRENVKRLKEEADRVKEELEK

SEQ ID NO: 12597 - protein, 179 aa, Artificial Sequence; identical to SEQ ID NO: 12596
  Synthetic

SEQ ID NO: 12598 - protein, 186 aa, Artificial Sequence
  Synthetic
EELERIKDEIRRILEELKREMEELTKESDRILRELERENEESAKRIKEILDELEKRVRDKPVDEKLKRELEELKERLKKLLKEVEDTTRKLKRELKELNRELRRRLEELEKRLRELLKKVDRDKSDDETLLRRLRESLEKLAKEVEDLLRKYERDVRELAKEDRKLNEELLKRVDDLAKEVRERLR

SEQ ID NO: 12599 - protein, 186 aa, Artificial Sequence; identical to SEQ ID NO: 12598
  Synthetic

SEQ ID NO: 12600 - protein, 182 aa, Artificial Sequence
  Synthetic
SKLEEIERELRELERSNEEEDRKWDDTTRKLEEDNREKNREWKKLTKDIRERVERLIRDLKDDKKTVRELRKEIRERSEKVRKELERHLEEVKDASRKLKKRLDDHRRELRDTVRRIRERLDKSEEARRLDEELEKVLRELKKRNEDTERRDREVNKKLEKENRDSEKENRDVLREIERALR

SEQ ID NO: 12601 - protein, 182 aa, Artificial Sequence; identical to SEQ ID NO: 12600
  Synthetic

SEQ ID NO: 12602 - protein, 179 aa, Artificial Sequence
  Synthetic
KKLEDLEEEIKKLLEELKERNERSAREDREILERLRDENRRTAEELDKSVREILKKTGDTEDLKKLKEEHKELKKRLKETTDRIRKTSKDLEKELRDATERIARELKRLVDDLRRKNLEDDRKLKEVRDTLEKLREENRKLNEEWRRKSEELRRRNEKVNKEVRDRNRETIERVDRKAK

SEQ ID NO: 12603 - protein, 179 aa, Artificial Sequence; identical to SEQ ID NO: 12602
  Synthetic

SEQ ID NO: 12604 - protein, 186 aa, Artificial Sequence
  Synthetic
EELERADRRLDRLLEESERDLDTIIRKLKKVVEELERTLEEAKRKAERTLEEIRRELKEAGLEERRLRELEEKLRRAEEELRKLEEDHRRRLKEVTDEVRRLIERHRRRLEEIKRRLEDLRRKGEPVEDLLREIKELLDDLRRHNEKLHRELEELIKTLRRHNEKLLEDIERLLRELRKEVEKLRR

SEQ ID NO: 12605 - protein, 186 aa, Artificial Sequence; identical to SEQ ID NO: 12604
  Synthetic

SEQ ID NO: 12606 - protein, 186 aa, Artificial Sequence
  Synthetic
DELRELRRELRKLLEDIRRRLEELTRENRDVLRKSREELERLLRRLKELLDRIRDSLRKRNGDEDKKRELEKVEREIEKLLRDLKRDLERLEKESEDSLRELEKELKRIEDEIKKLLEDAERLLERGEVDKDKMKKLLRDLERKLKRAEEESKRHIRENEKLTEEAARKVEELLKEIKRKLEELEK

SEQ ID NO: 12607 - protein, 186 aa, Artificial Sequence; identical to SEQ ID NO: 12606
  Synthetic

SEQ ID NO: 12608 - protein, 172 aa, Artificial Sequence
  Synthetic
SVEDTIRELEKRIRDLNREMERLNRESVEKIKRLNEKVRREIEDILREIKRLAENLKDVDERDLERLLKELRDELERLSRDSERELKRLEEEHRRARKKSEEDLRRLDKEVKDKPIDESLRRKLKKLADEHRETVDRMHEKNRKLADDHRDSVRKLEERIKRLTDRLREERK

SEQ ID NO: 12609 - protein, 172 aa, Artificial Sequence; identical to SEQ ID NO: 12608
  Synthetic

SEQ ID NO: 12610 - protein, 172 aa, Artificial Sequence
  Synthetic
SEVEETLKRLEEVIREAEKTIDDSNREIEEAVRRIKTTIEKSNRDLKDLVEKLKRLKEIDSEEVKRRLDEAAKRHKEILDDLRRKLEELEKRHRDTLKRLRERLDRIREEIERRGTTEDVRRRVKEIIDKLERKIEESERNLKRIIEDLEREMRESEERVKEIIRDLERTEK

SEQ ID NO: 12611 - protein, 172 aa, Artificial Sequence; identical to SEQ ID NO: 12610
  Synthetic

SEQ ID NO: 12612 - protein, 179 aa, Artificial Sequence
  Synthetic
SEIDEVLKRVEDSVREIERKLEEIERRLRRLNEEVKKRLDEIEEEIRRLVEELRRRNTKDERALRRIEEKIRDLKRKLDEILKKLKEDYERLKRELDKLLREHEERSERIKEELKKRGLPDDRLREIEKRIDDLNKKVRDEVERLKREADKSLETIKRLVEELKEKLDRLLEEVREEVR

SEQ ID NO: 12613 - protein, 179 aa, Artificial Sequence; identical to SEQ ID NO: 12612
  Synthetic

SEQ ID NO: 12614 - protein, 175 aa, Artificial Sequence
  Synthetic
STRERLKKVLRDVERANKELSDRNKRVLEKLRRDVERLSRENEKLVRELEEAIKDLRRKGRDLREEVERLSDEDRRANEELKRRLKKLEDDLDRIDRDLERKSRRLVEELEDLLRRLNVDEDLRREVEEVLKRIRDSNRDNRRKNEKVKKDIREILRRNEKRNREVNEKIRRDET

SEQ ID NO: 12615 - protein, 175 aa, Artificial Sequence; identical to SEQ ID NO: 12614
  Synthetic

SEQ ID NO: 12616 - protein, 185 aa, Artificial Sequence
  Synthetic
KETEEVKDVLRRVRKRIEDLSKKNKDDLRRVEERNKELNERVKRLLEELKRRVDDLKRKGRREDDLTREVEKLERELEEVLRRMREETRKLEDEIRRLNEELDRRLKKLEKEIRDTLKALRERVERREDLERVEEDVRRVIKEIRDLARENHEENRDVIRRIRESNKRTEDEAREVLDRIRKTAT

SEQ ID NO: 12617 - protein, 185 aa, Artificial Sequence; identical to SEQ ID NO: 12616
  Synthetic

SEQ ID NO: 12618 - protein, 177 aa, Artificial Sequence
  Synthetic
KEREEAEEMLKRLEEELRRLLEESEKIIERSERHLEKLLKDAEDEIRRVKEELDKIDIEEKVIEEVKRKIDEIKRRLEELAERARKVHKDLRDRHRKLFEEFKRVLDEIRRRLDSGGDREEIRRLIERLRELLEEIARRIEKTNRELEELNKRLADDIKRLIDELERVLREVEERSR

SEQ ID NO: 12619 - protein, 177 aa, Artificial Sequence; identical to SEQ ID NO: 12618
  Synthetic

SEQ ID NO: 12620 - protein, 175 aa, Artificial Sequence
  Synthetic
DEVETLLEEARKVLEELRKKIKELNEDSKRVLEELEKRIRDLDRRSTEVLRRLEESDLDRKEVKKMLDDLRREYEDMERRIKEVLDELEKKYRELEKEIDRAREELTKRLEDLKREGKSTEELEDALRKIRKAVEELKKDVRRTLEEIKKEVKRLIEEARRSLDKIRRDVEKRDE

SEQ ID NO: 12621 - protein, 175 aa, Artificial Sequence; identical to SEQ ID NO: 12620
  Synthetic

SEQ ID NO: 12622 - protein, 175 aa, Artificial Sequence
  Synthetic
EEVKRLVDDLREVTKENEKRARDLDRDSKRVSEENARKIETLNRDNERVNKELADSDRREEEVEDALRRLEEEYRRVHKENREETKRLREKYEELHERNKEVLERLKRKVDELRRKGKSTEKLDEDLERLERRNRKINEDAKTTLREIERENEELNKRLEETLRRSEKHLRDRRK

SEQ ID NO: 12623 - protein, 175 aa, Artificial Sequence; identical to SEQ ID NO: 12622
  Synthetic

SEQ ID NO: 12624 - protein, 179 aa, Artificial Sequence
  Synthetic
REVEKLIKELEDLNRDHARKVKELIAELEKLLRDHAEKVRKLIEEARKTLEDLREIVERKGPVEELLKEAEKKLKEIKEEIERSSKELKKEIDRIEEDIRRSTERLRREHKRVADDLRKKGLDKKDVREMIRRSEENLKRLNEEVKRAIRKVEEDLKELNKRARDVLEELRKRVEDTFR

SEQ ID NO: 12625 - protein, 179 aa, Artificial Sequence; identical to SEQ ID NO: 12624
  Synthetic

SEQ ID NO: 12626 - protein, 177 aa, Artificial Sequence
  Synthetic
SEEEELEKRLRDSEREIEKWLRDLERVIEEVAREDKKIHEELEKILEDVKRELDKLGIDDELRKELEKKLRKIKEELEKLNEDTRRELERVRRDLERLAEELKRRHDEIRKELERTGDSKVVEKLVEDLRRINEEAKRRLERLKEELRKVLKDYKDEIDKLVEELKRTLDEVRKKAK

SEQ ID NO: 12627 - protein, 177 aa, Artificial Sequence; identical to SEQ ID NO: 12626
  Synthetic

SEQ ID NO: 12628 - protein, 177 aa, Artificial Sequence
  Synthetic
DEEEDVRRTLEKVERDVERIDEDVERELRKVEEDDKRLHKELSEVVEKVERDIRRTGIEEELMDTARRRLEEARRELERLNKRTKELLDRIRKALEESHREVKELLERIEEELERTGDKKKLEELKERLKEALKRHEDKVRELKKELKKILDDYTEDVKRIKERLKRILEEIRRRKK

SEQ ID NO: 12629 - protein, 177 aa, Artificial Sequence; identical to SEQ ID NO: 12628
  Synthetic

SEQ ID NO: 12630 - protein, 177 aa, Artificial Sequence
  Synthetic
SSEEDVKRELERVRREDERIHRDLERVLEESERRVETWDRDAKRTLEKVEEDLRRDGLEKELVDKLKEALDRIREDIERSHRELRKLHEEIRDELRKLNEETDRRLRDIEDKLRKTGEEELLEELKRRLKEILDRYRREAERLKRENEEMNKRHRERLEELKKRLKELLERMKEARK

SEQ ID NO: 12631 - protein, 177 aa, Artificial Sequence; identical to SEQ ID NO: 12630
  Synthetic

SEQ ID NO: 12632 - protein, 177 aa, Artificial Sequence
  Synthetic
STEEDVRRVMKKVEDDVREINRDLERDLRRVEEAVERLDRDAKREIDRLREEIDREGIEERLKKEADEVLRRVEEEIKKSHEEVRRLLEEVERRLRESTKELEDRLRKVKEELDRTGDEKFAEDLKRKLKKVLDEHRRRIEELKRELEEVLERHARELKRLKDELKKLVDDIRRRRK

SEQ ID NO: 12633 - protein, 177 aa, Artificial Sequence; identical to SEQ ID NO: 12632
  Synthetic

SEQ ID NO: 12634 - protein, 177 aa, Artificial Sequence
  Synthetic
SDEEDVERELKRVKDEVDKINEDVRRELRKSEEDVERWDEDLERVVRRVEEEVRKTGIDEELKRKADERLEEAKKRVEDSHRRLREEHRRIEKDLRDSTREIEKLLRDIRKRLTDTGDKKVLEKLKKDLRDALKRHRDRVEKLKEENRKLNEDHKKTLEDIKEELKRLLDELKETRR

SEQ ID NO: 12635 - protein, 177 aa, Artificial Sequence; identical to SEQ ID NO: 12634
  Synthetic

SEQ ID NO: 12636 - protein, 177 aa, Artificial Sequence
  Synthetic
SDEEDVERELERVKRDVERLDEDAKRVLDEVRKAVEEINRDVERDLRRVEEEIKKTGIEERLMEEAKRRLERIKEELKKSTEELERLLEEVKRRIEESHRRMEEELRRIREELERTGSKEKLKELKERLKRLLDEHRRELKRLKDELKKALDDHKRKVDKLKKELKDILKKIRDDRR

SEQ ID NO: 12637 - protein, 177 aa, Artificial Sequence; identical to SEQ ID NO: 12636
  Synthetic

SEQ ID NO: 12638 - protein, 177 aa, Artificial Sequence
  Synthetic
DDEDDVRRVLRRVAEEVRKLDEDLKRVLKESKERVKRWNDDAKRRLDKVREDLKRKGLDESALRRAEDVLRRIKKRIDESTEDLDRLHKEIEKEVRDSHKKMREDLDKVREDLERTGDKKVLEELKKRLEDLLKRHEEEVRRLKEENKKLNDDHRRELERLKKELTDLLKRLDDERK

SEQ ID NO: 12639 - protein, 177 aa, Artificial Sequence; identical to SEQ ID NO: 12638
  Synthetic

SEQ ID NO: 12640 - protein, 177 aa, Artificial Sequence
  Synthetic
SLEEDVKRVIDRVREAVKKINDEVEKELRKSEKAVEDWNRRLEEIHDRARRELEKAGIDEELRKREKREHERSEEELRRSTEELKKKHDEIRKRLEDSTREAKKTLEEVERELRETGDKDKLEELKRRLKRLLDEHRKRVEELKEENKRLNKEHEKKVEDNVRRVRELLKRVEDRRR

SEQ ID NO: 12641 - protein, 177 aa, Artificial Sequence; identical to SEQ ID NO: 12640
  Synthetic

SEQ ID NO: 12642 - protein, 179 aa, Artificial Sequence
  Synthetic
SEVEEIVKKLEELLRRWEKTVRDIVEELKRLLEEIEKLSRETKERLKKILEDVKRLAEEGRLDDAEVDRLRKELEDLHRELEERLRELMREMEERLKEANERSKRIKEEIEKDLKELTDRRGRVDELEDIARRVKEELDRLNEELERIARKVKEDLKRLLEDNKRVLDEVKERLDRIRK

SEQ ID NO: 12643 - protein, 179 aa, Artificial Sequence; identical to SEQ ID NO: 12642
  Synthetic

SEQ ID NO: 12644 - protein, 179 aa, Artificial Sequence
  Synthetic
SEIEDIVRRLEELLERWKRRVDKAKERNKRLLEKWAKEVEDIKRELEKLLEDVRRLKEEGRSDKRDVDRLIERIEELLERLHRRSEEIKRDSRRHAKELHRISEEIKERIRRLLKKVTDDKGRVDELEKIVEDVERELDKINEDYNRVLKRVEEELDRLNEDLNRVAKRVKDALRKIEE

SEQ ID NO: 12645 - protein, 179 aa, Artificial Sequence; identical to SEQ ID NO: 12644
  Synthetic

SEQ ID NO: 12646 - protein, 179 aa, Artificial Sequence
  Synthetic
SEIEKVVEEAKKLLKRWEDEVRKHDKELKEVLDRWKKEVDDIKRRLEELLREVRRLKEEGRSDDRKLEELKREIDKLLEDLHRRSKRLVEDLKRTHDEVDDRSKKIKKEIRDRLKDIERRRGPVDELRKIVEDVERELDRLNDENRDSLRRVVEALEEINKDLNRDVKRVKDELDKTRK

SEQ ID NO: 12647 - protein, 179 aa, Artificial Sequence; identical to SEQ ID NO: 12646
  Synthetic

SEQ ID NO: 12648 - protein, 179 aa, Artificial Sequence
  Synthetic
SEVEEIKKELKKLDEENKRVIDRIVREIERLNEENERVARKVIKEIEELLRKLEKLRRDGRSDETVVRKIKKDLEELLKRLEEHIRESKDRLRDLLRRVREHLERSRRRMEELRDRVRRNGKEEEDLRRVLKESEDRNRKLLEDLERKVRDVKRRDDELLKRAREALKRVKDEIEKIRK

SEQ ID NO: 12649 - protein, 179 aa, Artificial Sequence; identical to SEQ ID NO: 12648
  Synthetic

SEQ ID NO: 12650 - protein, 179 aa, Artificial Sequence
  Synthetic
SEVEDIIRRIKELDDRNERKVRELVKTNEKLLRDLHEKSKRIVKEMRELLKEIEDLARRGKSDDRRLEEVRERLKRLLDDYERTVERLKETNERLNRELEKHLEDSKKRLEDLREEVRRRGKDEEELKRVIDESKKRNEKLMRDYEEISKKVHEDVERDAERLRRIAKEVEEELERVRK

SEQ ID NO: 12651 - protein, 179 aa, Artificial Sequence; identical to SEQ ID NO: 12650
  Synthetic

SEQ ID NO: 12652 - protein, 179 aa, Artificial Sequence
  Synthetic
SEVEKIKEDLKRLLDEVRKKAEELKRENRELLRRLHELSKKIIRELEKLLEELADLVRKGRSDDKVVKRIRDELEKLKREYERAVKELRDRNRELNEELKRVLERVKEDMDRLREEVRRRGKEDEDLERTIREVEKELRRLLEDYRRESKKVHEDIDEDRRRLEDAVREVEKEIEKVRR

SEQ ID NO: 12653 - protein, 179 aa, Artificial Sequence; identical to SEQ ID NO: 12652
  Synthetic

SEQ ID NO: 12654 - protein, 182 aa, Artificial Sequence
  Synthetic
SEVERIKEDIKKSNEDIRRTAEEIKERIKKSNKEVEDEVREIKERIKRILDKLKRVKEEGRLDDRLKKEAEKVLEDIKRKLEELEEKHRRDLKRIRDRLREVEKRHRDELRRLREELKRRGSDKSVVDDLERVMKESEERVKRIIDDLERTLRESEKNLKRIIDDLERVMREAREAIDRLKK

SEQ ID NO: 12655 - protein, 182 aa, Artificial Sequence; identical to SEQ ID NO: 12654
  Synthetic

SEQ ID NO: 12656 - protein, 178 aa, Artificial Sequence
  Synthetic
SEDDELRRRLEELKRRIEDLIRKLREVLKRSEDELRKILRELREVDKDLRRRIEELIKDIQDEEVIDRLKKLLKRHTDRSRELEKRLKEILDELRKRHEKVERDLRRILEELKKLSDDRELDEDEAKKRLEEILRRAEELLERLKRTNERVNRKVREDMKRAKEHAKRLLEEAEELAR

SEQ ID NO: 12657 - protein, 178 aa, Artificial Sequence; identical to SEQ ID NO: 12656
  Synthetic

SEQ ID NO: 12658 - protein, 180 aa, Artificial Sequence
  Synthetic
DEVEELIKEVEKVNEDAARESEKRNRELKKMLERVKRENKRLIRELKELLDDARRKNSKDSTLSETLKRVLKESKERVDRLVKRVDDLLRELERRDRELHKKLEERHRRIRDRLREEVREKREVLKKLEEVLRESKKRLKEWNDRNKKTLDDIRREIEKSKKEHEDALRRIEEELKKTET

SEQ ID NO: 12659 - protein, 180 aa, Artificial Sequence; identical to SEQ ID NO: 12658
  Synthetic

SEQ ID NO: 12660 - protein, 180 aa, Artificial Sequence
  Synthetic
SELEKLVKELRDLNEKVARDSKRLNDKLEEVLDRLRRRNEELIKRLEEVLEDVERKNSKDSTLEEELDRLLKKSREDLDRLVDEARKLLDEARKRDKKLHEDLKREHDRVAETVRRDISKDKELLDRLRKMLKESRDSLRKLNKENEETLRRIKKKLDESKRKHEEVLKDIKRRLEELSR

SEQ ID NO: 12661 - protein, 180 aa, Artificial Sequence; identical to SEQ ID NO: 12660
  Synthetic

SEQ ID NO: 12662 - protein, 180 aa, Artificial Sequence
  Synthetic
DEVERIIERLRRVNKRVREENERLIKEIEDLITEIAKRSRDLNRELDKTLKDVRRKNDKDERLKREVEELLKRLEEEDKKLHDDAERALKRSKEEMDKLMRELERLHKEVKDELDRDVREKEEVLRRLEKVLRESRKSLEDSAKKHKDVLDEVKKTLKKLNDENREVLKRIKKELDKTRT

SEQ ID NO: 12663 - protein, 180 aa, Artificial Sequence; identical to SEQ ID NO: 12662
  Synthetic

SEQ ID NO: 12664 - protein, 179 aa, Artificial Sequence
  Synthetic
SEVEKLIEDMKKVAKELADESEEHIKRAEEVIDRLAKEVEKHDRDVEDTIRRLEESDRDKREVEEVLKKIKRSSEELKEKLRRVLEKLRKTSKELEEKLREVLKRLEDRIRKLETEDRSSEEVKKRLREMLEELRRRLERLKDKNKEVLDRLEEKLRKLEKENDDSLKEAEDKLRERER

SEQ ID NO: 12665 - protein, 179 aa, Artificial Sequence; identical to SEQ ID NO: 12664
  Synthetic

SEQ ID NO: 12666 - protein, 179 aa, Artificial Sequence
  Synthetic
SEVEKLIEDIERIIRTLAEEVRRHDEDARRVLEDLARKVRKHNEDVKKVLEDLRESDRDRKFIKEVLERLRKTSEELKRELEEVLRRLRESSKELKRKLREVLKEIKRRAKKLEKDDTSSEEMKERLRRMLKRAEDELRRLEEENDRVVERLERELRRLTEDNKRTLKKIEEDLRRREK

SEQ ID NO: 12667 - protein, 179 aa, Artificial Sequence; identical to SEQ ID NO: 12666
  Synthetic

SEQ ID NO: 12668 - protein, 179 aa, Artificial Sequence
  Synthetic
DEVRDLIRRLEETVKRLADEVREHDKRARDILRELKKEVKETNRRSEKVADDLEKSDRDDKEVDEALDKLRKEYEDLKKRLDDVLEEIRKSSEELEKKLDKVLEEMARLVDKLRRDDTSSEEVKERLKKVLEKLKRDLEKLKEDNRRVLKELEEELRKIKEELDKSLDDLRKRLEDRKK

SEQ ID NO: 12669 - protein, 179 aa, Artificial Sequence; identical to SEQ ID NO: 12668
  Synthetic

SEQ ID NO: 12670 - protein, 180 aa, Artificial Sequence
  Synthetic
SLEEKFRRVLEESKESLERLKRKVEKVLRESEERLKRWLDKVKKVLEEVDDALRRLKDRLDEKLLKRLRDLAREILEEIKRLLDEAKKRHDEVRERVERLLKKVLDDHRRAEERVKREVRTKEIVERLIEELKKLNKELADRLEEIIRRLEEINERLRERIERIITRLRRLLEELEREAE

SEQ ID NO: 12671 - protein, 180 aa, Artificial Sequence; identical to SEQ ID NO: 12670
  Synthetic

SEQ ID NO: 12672 - protein, 184 aa, Artificial Sequence
  Synthetic
SEDEDLKRVLDEAEKRLKDLLDDLRRALKRSEDELRKNNEDLERVLKRVEERLKELLDRVDRDSLKELLDRVREALERLRREVEETTKRVSDEHRRLLEEAERTLEEIRRRLEDLERRVRKKSRRREIVEEIKKRIRDLLRELEKKIEELKTTSERLNREHHKKIEDIKKEIEDLVRELEKKVK

SEQ ID NO: 12673 - protein, 184 aa, Artificial Sequence; identical to SEQ ID NO: 12672
  Synthetic

SEQ ID NO: 12674 - protein, 184 aa, Artificial Sequence
  Synthetic
SLREKLEEVLRRIEEALERIREEVEKVLRDSRDDNRRVLKELKELLERVREALEDLLRKVDRDRVRETLKRVEDRLRELEEEVRRHHKRSEDRHRELEKDLERVLEEVKRRLRKLEKDVEEKSRTDKIVKEIIEELEKLLRDIKKRARELIEESKRINEDNNRRAEEVAEEIRRLLEELERKLR

SEQ ID NO: 12675 - protein, 184 aa, Artificial Sequence; identical to SEQ ID NO: 12674
  Synthetic

SEQ ID NO: 12676 - protein, 184 aa, Artificial Sequence
  Synthetic
SLEEDVKRVLREAEEELKKNNERLRKVIEDSKRDNDRVLDELRKVLEDIEKALRDLLREVDRDRLREDLERVRRRLEELSRRAKEHHKESRKEHEKLRDDARRVTEKVEERLRRIREDLERRSRTDKIVDEVRKEIEKLVRDHHKRIKDLKDDLKRLNDENNKRAKEIIDEMKRLLEEIEKRVR

SEQ ID NO: 12677 - protein, 184 aa, Artificial Sequence; identical to SEQ ID NO: 12676
  Synthetic

SEQ ID NO: 12678 - protein, 182 aa, Artificial Sequence
  Synthetic
KDVEDIKRRIEELNKKLKEKIERIKKRIKELNEEAAKKVEEIKERLKRLLDEIRELVRRDGPREDEIRRLREDLKRLLKEMEDTLKELEDRHERLREEVEKTLRELEKKHKELKEELDRQPVDDSLRKRLEEVLRESKKTAEDLKRDLRRALEESKKNLKRLLDEVRKVIDEIRKALEELER

SEQ ID NO: 12679 - protein, 182 aa, Artificial Sequence; identical to SEQ ID NO: 12678
  Synthetic

SEQ ID NO: 12680 - protein, 182 aa, Artificial Sequence
  Synthetic
SEVEKIKKDIKDLNDDARRRLEEIKRRLEKLLKELEEKHRELKKELKKLLDEVRDLVRREGPREEVLREVKKRLDDVRRENKKLTDEVREILKKLEEEMKRILEELERRHRELKKRLDEEPVDDRLREDAERVLRESKKNLDELEKDVRRVIKRIEDEARRLNEDLKRMLERIKRELEKLEK

SEQ ID NO: 12681 - protein, 182 aa, Artificial Sequence; identical to SEQ ID NO: 12680
  Synthetic

SEQ ID NO: 12682 - protein, 176 aa, Artificial Sequence
  Synthetic
SEEERLEEVLKRVETELRRLKRELEKVLRESEEALREIIKKIEDAVRDNAEKVKKLSRTVDEDLVRELEKLLRDLERKSREAIRRLEELYREVKERVERVTRELEERLKDLERRVKERPVDRRVEKELEDLLRTATKVLEDLKRDLKRLNEETEEVVKTLEDSHRRSNEEVERRVR

SEQ ID NO: 12683 - protein, 176 aa, Artificial Sequence; identical to SEQ ID NO: 12682
  Synthetic

SEQ ID NO: 12684 - protein, 176 aa, Artificial Sequence
  Synthetic
REREELEEVLERSKRELERLVEEIKRALDESRRRLEEIEKRIEEVIRRNKEEIKKLSRRVDEETVRELEKRLRDLERRSKKVLTDLKKKYEEVEREAREVIKELREKYKRLEEEARRRPVDEKLKEELKELNRESRKVVEDLREKLDRLNKDTERVVRELEKEHRKSNEEVRKTVK

SEQ ID NO: 12685 - protein, 176 aa, Artificial Sequence; identical to SEQ ID NO: 12684
  Synthetic

SEQ ID NO: 12686 - protein, 182 aa, Artificial Sequence
  Synthetic
DEEEELKEDIKRILEELRRLAKEHEELNRRINKELEDLVREHKKRLEDALKRLREIVRDRGNDEDVTRRMDEILDELRKHSEDLKRRMDKLLRENEEHSDRLRKRIKELTDRLRRRVEDLVRKRGRVEELEKVLKEAEDDVERIKKRLKRINDESRKHVERLKEELDRADKRIEDEVEKLKK

SEQ ID NO: 12687 - protein, 182 aa, Artificial Sequence; identical to SEQ ID NO: 12686
  Synthetic

SEQ ID NO: 12688 - protein, 182 aa, Artificial Sequence
  Synthetic
RIEERLKRVVDKVDDTLRKSEKHLEDVVRDADRDIDRNRRENEKVVKEAEDILRRLVEEAGRELDDLRRVKKEVDKLLKENEEKLKKVREDIERILRDLKRKHEAVRERLRKLLTDVAREKIPEDKVRELEEEAERLLDELRRKNEEAVRRIKKLLDDLNKHSEETIRRIKKLLKELEDKTR

SEQ ID NO: 12689 - protein, 182 aa, Artificial Sequence; identical to SEQ ID NO: 12688
  Synthetic

SEQ ID NO: 12690 - protein, 178 aa, Artificial Sequence
  Synthetic
STEEKLKELKKEADKLLKELDKELRDNLRRLRKIVEELKKENRDLTRESEEVLKRLNSDDETVERVLRELRERHRKLEEETEEVLRRLERKHDKLREDLKRIVDEIEKKIRDIRRKPVDDKDVKKLIEEIRRILEKAREEVERLSRDSKRVAEELRKRHKELIDRNKRVLEELKRRRD

SEQ ID NO: 12691 - protein, 178 aa, Artificial Sequence; identical to SEQ ID NO: 12690
  Synthetic

SEQ ID NO: 12692 - protein, 178 aa, Artificial Sequence
  Synthetic
SEVEEVARRSRKLNDDLKKIIEELIRRSRKINDELRREIERLIRESRKLNRELEELKRRGELTEEILKKAKEDHERLDRKVKELLKRALDTHRKLTDEARKKLEEVLKRHEDLARKLKDTIEEDKVRRLNEENKESLRRLERELEKLNKENEDSLRTLEELLRELNKENKRSLDELRK

SEQ ID NO: 12693 - protein, 178 aa, Artificial Sequence; identical to SEQ ID NO: 12692
  Synthetic

SEQ ID NO: 12694 - protein, 177 aa, Artificial Sequence
  Synthetic
SLVEEVEERVKKLHDENRELDRKSKRDVEEVHKKNEKLIKDVERTVREMIRKLRELKGTSEETVRRIEEEVRKVRTELEKEMRELSKENEDVARRLREEYKRAEEKNKRAVEEIRKRLLDVEEELRRLEEELRRSIKESREELRRLEDELRRSIEKLEDALRRLAKELDEVIKDLKD

SEQ ID NO: 12695 - protein, 177 aa, Artificial Sequence; identical to SEQ ID NO: 12694
  Synthetic

SEQ ID NO: 12696 - protein, 177 aa, Artificial Sequence
  Synthetic
SLVDEVRRRVDELHKDNKRLDDESEKKVRDAHRENERLDDESRRKVKEAIRKLEELKGTSEETVKEIIKEVEKVVDELRKEYDDLERRNKEVADRLREEYERARKKNEDVLREIRDKLLDVKESLDRLAEKLKKSIKESEDILRELEKRLRDSIRESRKILEDLRRELEEVIKRLED

SEQ ID NO: 12697 - protein, 177 aa, Artificial Sequence; identical to SEQ ID NO: 12696
  Synthetic

SEQ ID NO: 12698 - protein, 177 aa, Artificial Sequence
  Synthetic
SLAEEVEKRVRDLHRKNEELDRESEKKVRDMDRKNKELIKRAEEEVKKVIDKLRKLKGTSEETVRRISEEVKKIVEDLERELRKLEEENRRVVEELRDKYRKLEKENRDMLEDIKRRLLDVEEKLRELARRLKESIRESRERLRRLEKELEDSIRELRRAIDTLTKRLEKAIEELER

SEQ ID NO: 12699 - protein, 177 aa, Artificial Sequence; identical to SEQ ID NO: 12698
  Synthetic

SEQ ID NO: 12700 - protein, 177 aa, Artificial Sequence
  Synthetic
SLVEEVERRVRKLHEENKKLDKESEDKVREANRRNEELIKKVTESVRRMIEKLRRLKGTSEETVRRIKREVEEVVKKLRKEMKDLEEENKRVVEELRKRYKDAKKRNRDALEDIKRRLLDVEEELRRLADELRRSIEESERILKKLEEELRRSIEELRRALEELDEELKRVIRELER

SEQ ID NO: 12701 - protein, 177 aa, Artificial Sequence; identical to SEQ ID NO: 12700
  Synthetic

SEQ ID NO: 12702 - protein, 177 aa, Artificial Sequence
  Synthetic
SLVEEVKKRVDDLHKRNRELDDRSEKMVRKANEENKELDKKSKEDVDRLIERAERLKGTSEETVKEITRDVERVAKRLEDEYRELEKRNREVVRELRKRYDDLEKENRDMLKDIRDRLLDVEEELRRLAEKLKRSIEESREILKELERRLRESIRRSREILKRLKEELERAIERLRR

SEQ ID NO: 12703 - protein, 177 aa, Artificial Sequence; identical to SEQ ID NO: 12702
  Synthetic

SEQ ID NO: 12704 - protein, 177 aa, Artificial Sequence
  Synthetic
SLAEEVEKLVRDLHRKNKELDRRSKKTVEDIEREARELDKRSKEEVERMIKKLRELKGTSKETVDDIEREVREVVEKLRKEYEDLSKKIRDVADKLRDDYRKLEEENRKALEDIRRELLDVEDKLRELEKELRDSIRESREILERLERRLEELIRRSKRILEELERELEEVIRELRR

SEQ ID NO: 12705 - protein, 177 aa, Artificial Sequence; identical to SEQ ID NO: 12704
  Synthetic

SEQ ID NO: 12706 - protein, 177 aa, Artificial Sequence
  Synthetic
SLDDDVEKKVRELDKRNEDLDRKSEKEVEKVHRKNKRLDDESEKEVKRMIEELKKLKGTSEDTVRKIKEEVEEVVRKLRKEYKELEEENEEVVKKLRKEYREAEEENRRMLEEIEKRLLDVEEELRRLAEELRESIERSRERLKELERRLRESIARSREILEELERRLKRAIEDLER

SEQ ID NO: 12707 - protein, 177 aa, Artificial Sequence; identical to SEQ ID NO: 12706
  Synthetic

SEQ ID NO: 12708 - protein, 177 aa, Artificial Sequence
  Synthetic
SLAEDVEEKVKELNRRNKKLDDESKEMVKRAHDRNRELDERSKDRVRRVIEKLRRLKGTSEETVERIDREVKKIVRELKEEYERAKEENKRVVDDLRRRYERLEDENREMLDDIRRRLLDVKEKLEELAERLRKSIEESRDILRRLEKELRDSIKRSEEILKELTDRLRKVIKDLRD

SEQ ID NO: 12709 - protein, 177 aa, Artificial Sequence; identical to SEQ ID NO: 12708
  Synthetic

SEQ ID NO: 12710 - protein, 177 aa, Artificial Sequence
  Synthetic
SLVEEAERRVRELIKELERLDDRSREMVKEMHERNRELIERVEKRVREVIEELRRLKGTSEETVKRISEKVKEILDRLRKLVEDLRRENERVVEELRRRYKEAEDRVKRLLDEIRKRLVRSEDDLRKLAEDLKRVLKRSRDILRKLEEDLRRSIRELEEALRKLEEDLRRAIEELET

SEQ ID NO: 12711 - protein, 177 aa, Artificial Sequence; identical to SEQ ID NO: 12710
  Synthetic

SEQ ID NO: 12712 - protein, 177 aa, Artificial Sequence
  Synthetic
SLKDDVEKKVEDLKKEAKDLDRESDKKVKTAHKRNEELDRKSADDVRKLIRKLEKLKGTSEETVKRIEEEVKEVVRRLREEYKRMEDENREVVRRLEKEYRDLERKIRELLERIKDKLLDVEEELKRLAEELERLIRDSRRILEELKRELKRSIEESRKILEDLERELEKVIRELKR

SEQ ID NO: 12713 - protein, 177 aa, Artificial Sequence; identical to SEQ ID NO: 12712
  Synthetic

SEQ ID NO: 12714 - protein, 177 aa, Artificial Sequence
  Synthetic
SLAEEVERDVKRLDEENKRLDDRSRREVEKMDEENKKLIEDARREVREMIEKLKKLKGTSEETVERIKREVEKVLRELEERVRRLAEKNKEVVERLKKEYEEAAKKNKEVLDDIRRRLLDVDEKLKELAKRLRDSLERSKEELKKLEEELRKSIKELEDALKKLEEDLRDVIRKLEE

SEQ ID NO: 12715 - protein, 177 aa, Artificial Sequence; identical to SEQ ID NO: 12714
  Synthetic

SEQ ID NO: 12716 - protein, 177 aa, Artificial Sequence
  Synthetic
SLVEDVERKVRELDKRNRDLDRKSKRKVEEADKENRKLDEDSERKVRELERKATELKGTSEEAVKRIEDEVREVVRRLRELYKTAEEKNKEVVKTLEKLYRDMERRNKEVLDEIKKRLLDSEESLRRLEEELRKSIKESKEILDELRKELEKSIRESKERLKELEKRLEELIRELKR

SEQ ID NO: 12717 - protein, 177 aa, Artificial Sequence; identical to SEQ ID NO: 12716
  Synthetic

SEQ ID NO: 12718 - protein, 177 aa, Artificial Sequence
  Synthetic
KLVEDAEELVRRLDEENKRLDDDSKRRVEEANRENEKLIKEIEDEVRKMIKKLRDLKGTSEETVKRIEKEVRDVVRDLKRLVDELKRRNEKVVKDLRRKYEEAKRKNEEVLEDIKRRLVRSEEELRKLAKRLKDSIDRSRKILEELERELRRSIDELRRALEELTDELRKVIEELRK

SEQ ID NO: 12719 - protein, 177 aa, Artificial Sequence; identical to SEQ ID NO: 12718
  Synthetic

SEQ ID NO: 12720 - protein, 177 aa, Artificial Sequence
  Synthetic
SLAEEVEKEVKKLDEENRKLDRDSTETVKELNKKNERLDRESKRKVDEVIEKLERLKGTDREIVERIAEEVKEIVKELEEEYRRAKRENEEVVKKLRDEYRRLEERNKKALKDIRDKLLDVKEKLDELADELKKSLDRSRRILERLEEELRRSIRRSEDILRRLKEELERVIRELRR

SEQ ID NO: 12721 - protein, 177 aa, Artificial Sequence; identical to SEQ ID NO: 12720
  Synthetic

SEQ ID NO: 12722 - protein, 178 aa, Artificial Sequence
  Synthetic
SVDEEVEKLLKEHEERIRELIKEVEKLNREHAKRIEELIRKLKETNKRIADKIRDLKRQGRDAKEEVEKELRRLEEEHERVRREVKRSTEELEKRHEDLERRVRKSSEDLKDRLRRLRDGLDEEKLRTIARRIKELNDRFKRAIDESRKHIEELNRRLEKVVEDSRRHLEELADEVRR

SEQ ID NO: 12723 - protein, 178 aa, Artificial Sequence; identical to SEQ ID NO: 12722
  Synthetic

SEQ ID NO: 12724 - protein, 178 aa, Artificial Sequence
  Synthetic
SVLEELKRLLDEHRERLERLIRELRKLNEDHDRRIKELIERLKKLNEDIAKRIEDLKRDGRKVDEEVEEILKRAREEHRRLEEEVRESTERLKRKHDRVKEEVEDSSRELKERLDRLRDGADEDVLRKIEEDIKRLNREVEKAIRESEENIKRTNKRFKDELRKSEKHLEELVKRFRD

SEQ ID NO: 12725 - protein, 178 aa, Artificial Sequence; identical to SEQ ID NO: 12724
  Synthetic

SEQ ID NO: 12726 - protein, 178 aa, Artificial Sequence
  Synthetic
SVLEEVTKLLKDHEDRIREIIKRLRKLNRDIDERIKRLIDEVRKKNDDIRRKIEELKRRGRDRREEVRKDKKDLKKDHDDVRREIDDTLRRAREEHDRVREEIRESSRRIEERLKELKDGLDEERLKRLREELEKLNRDVERVIKESKENLDRTVTEAKRELKRSEDNLERLAREFER

SEQ ID NO: 12727 - protein, 178 aa, Artificial Sequence; identical to SEQ ID NO: 12726
  Synthetic

SEQ ID NO: 12728 - protein, 175 aa, Artificial Sequence
  Synthetic
TEEEILRRVERDLERLNRELERIVREVEKELKKINDDYERVLKKVKDDIDRIREELDRQGVRTEEADERVKELIKKSRDHARRLNEESKKIIDDIRKLLREVHEKSEEIIKEMRRAKLSDKELEELLKRWEEDVKRIVEEVKKLLDEWRERVKRAKDENEKLLRDLEKLVEDLAR

SEQ ID NO: 12729 - protein, 175 aa, Artificial Sequence; identical to SEQ ID NO: 12728
  Synthetic

SEQ ID NO: 12730 - protein, 175 aa, Artificial Sequence
  Synthetic
SKEDVLREVKRELKRLLDDNRRMLEEVEEAARRLNKDYNDVLKEVEEEIEKIIRELEKKGKKDERVDRRIEELKRDSRRHAEKLHDDSRKLREKLKEIHDKLKRDLDELRKRMDDADLSEEDLKRLLDEVRRLSEKTKEDLERILRKWKEDVERAKERNRRELERLEREIKELAR

SEQ ID NO: 12731 - protein, 175 aa, Artificial Sequence; identical to SEQ ID NO: 12730
  Synthetic

SEQ ID NO: 12732 - protein, 178 aa, Artificial Sequence
  Synthetic
ELDKIVEEVRKALREILEDYKRFSKEIHDRDKELADRLREILKDVKRAVDELIKKLSRTKELEETARRLEKRIEELRKEVEDHLKKSEDRNRELKEELRDTLRRVEETIEEIRRRGEPVEDVVRKLRELLERFRKKAEDLKEENKRINEENERKIREIVKTLRKLLDELREKLERTKK

SEQ ID NO: 12733 - protein, 178 aa, Artificial Sequence; identical to SEQ ID NO: 12732
  Synthetic

SEQ ID NO: 12734 - protein, 178 aa, Artificial Sequence
  Synthetic
SLEDTLRKVDKDLKDNMRRLEETAEKVRRDIDRDEERLRRISEELHRRIEELIKRLSRDERVKRKVEELKKRNEDNEREYKDTVRRIKEEIKRLEDEYKKHLEDVARRLEEIRRRGEPVEDVVRDAKRLLDEHHDLARKIVEDLRRLLEDLHRKSKKSVEDNERLLKRMEEILRETER

SEQ ID NO: 12735 - protein, 178 aa, Artificial Sequence; identical to SEQ ID NO: 12734
  Synthetic

SEQ ID NO: 12736 - protein, 171 aa, Artificial Sequence
  Synthetic
SELEEVARRVEKLLEKHKEDLKRLLEKSEEDLRRAEEEVKRLLEEIREELDRLRKRNVDRETVKEMEKKLEEKIKRLEDMLRRLEERDEELNRRSEEHNKELRKEIEDLLRKLPEDEEIKKVRKKVEDVHEESKRLNEENRRRTKEVSDKIREIIKEIRKEIKKASDELEK

SEQ ID NO: 12737 - protein, 171 aa, Artificial Sequence; identical to SEQ ID NO: 12736
  Synthetic

SEQ ID NO: 12738 - protein, 171 aa, Artificial Sequence
  Synthetic
DELERAVEEVEKRLREHLERIKRLLEESRELLKRHEKLLEDVLRRIRELLKRAEDRRIDEETVRRLRKEIEDLERELEKHNRELRKRDEDLNRESEEHNDKLRREIEELERRLRDDELIKRVKERVKEAHKRSRELNERNRRETEKMHKKSRDLLRKIREEVDRMSDKLRK

SEQ ID NO: 12739 - protein, 171 aa, Artificial Sequence; identical to SEQ ID NO: 12738
  Synthetic

SEQ ID NO: 12740 - protein, 170 aa, Artificial Sequence
  Synthetic
SEEELLRELEKKLRELRRKVDETLRDLRRRLKELEEDHRRTLEESERHLREVEKKLSRTRELERLAEELERRHRKASEEVKKRLTDLKRDLDRLKKDIDERLERLRDELRKRRVDEKLDRRVEELIKEIEELLREVEKLVEDLIRTIKKLNDDLREDNKRLAKEMEDRAR

SEQ ID NO: 12741 - protein, 170 aa, Artificial Sequence; identical to SEQ ID NO: 12740
  Synthetic

SEQ ID NO: 12742 - protein, 181 aa, Artificial Sequence
  Synthetic
SAVEDLEREVRKLIRDLEDLIRRLEERNKRIAEEIEKLNEELNRENKRIADEIRRIKDERGTDEEVAERIKRLLDDAARAHRELDREVERLLKEAEDEHKKLADEIRKLLARVDKALKDLRKDVSEEALERLKRELRKLAEELKKVLKRSRDHLKEVKRRHDENIKRSDDHLKRVADEARK

SEQ ID NO: 12743 - protein, 181 aa, Artificial Sequence; identical to SEQ ID NO: 12742
  Synthetic

SEQ ID NO: 12744 - protein, 181 aa, Artificial Sequence
  Synthetic
SVAEELEKDIRRIEEEIKELLERHRELNERIVREIEDLNRKLNEMNKRVVEELRKVKRDRGTDEEVEKRIRDILDKLRRLHRKVDREVEELLRALEEHAKELERRIRELLKRAREKLEELRKDVDDRVLKKLEKRLRELEEEAKKLLKESKEHVDEVRKRHEENIRRSEEHLRRVLEELRR

SEQ ID NO: 12745 - protein, 181 aa, Artificial Sequence; identical to SEQ ID NO: 12744
  Synthetic

SEQ ID NO: 12746 - protein, 181 aa, Artificial Sequence
  Synthetic
SVVEELERRIEEIAREIEELNERHNRKNKEIADRIRDLNRRLNEANKKIVREIEEIKRRDGDDEDVRREIRELLERLKELHRRVDRKVKELLDELEKHLREVDRRVEELLRRARKTLEDVRKDVDSRVLDKLRKELDDLRRRHEENVDRSRKHLEEVRKEHEENIKRSERHLEEVKKEAER

SEQ ID NO: 12747 - protein, 181 aa, Artificial Sequence; identical to SEQ ID NO: 12746
  Synthetic

SEQ ID NO: 12748 - protein, 181 aa, Artificial Sequence
  Synthetic
SVVETLEKRVRELIETLERLIERLDRENKRVAEEIKRLLDEHDKTNKEIVERIRDIKRREGTDERVRTEIEELLRRLEAHVRELKKTIEDLLRKLKEMHDRLREEIRRLLEEARKELEDLRKDIDSRVLRKLEEELRKLEEKLRKLLKDSEDHLREVLERAKRVLDDSRRHVDEVRREAEE

SEQ ID NO: 12749 - protein, 181 aa, Artificial Sequence; identical to SEQ ID NO: 12748
  Synthetic

SEQ ID NO: 12750 - protein, 181 aa, Artificial Sequence
  Synthetic
SVMEDLERRIREIIKEIEKLLEDLKRENRRVAEEIERLNREHNELNKRIAEEIERIKRRRGRDEDVSERIRELLEALKEHLRRLDEEVRRILKRLEDLHRELEKRIRELLKRAEDELEALRKDVDSRVLKKIEDELKKLEDKAREVLKRSRDHLKKVEDDHRENVRRSEEHVKDVLRRFEE

SEQ ID NO: 12751 - protein, 181 aa, Artificial Sequence; identical to SEQ ID NO: 12750
  Synthetic

SEQ ID NO: 12752 - protein, 181 aa, Artificial Sequence
  Synthetic
KVLEDLDRDIKRIIDEIRRLNEELNREIEEIKRRIKRLNEEHNERNKRLAEEARRIKDERGTDEEVLKRIKKLLRELEEHLEKLDEDVKKLLREAEESIRELDERVEKLLREIRKLLEDLRKDVEDEVLKRLEEKLERLREEHERNAREIRKELEKLEKEHRENVERSRRHVERVEREFET

SEQ ID NO: 12753 - protein, 181 aa, Artificial Sequence; identical to SEQ ID NO: 12752
  Synthetic

SEQ ID NO: 12754 - protein, 181 aa, Artificial Sequence
  Synthetic
SVVERLKEIAEEIIRRIEELNKEHNKRNREIAETIERLNREHNELNKTLVREMKEIKRDKGKDEEVTKTIEKLREELERHLDKLDKDVKKLLDDLRRHNRELDREVRRLLEELRKLAEELRKDIESEVLKKIEEDLRRLLRKHEENSKESEKHVEEVEERHRRNAEDSKRHVEKVKEEVDR

SEQ ID NO: 12755 - protein, 181 aa, Artificial Sequence; identical to SEQ ID NO: 12754
  Synthetic

SEQ ID NO: 12756 - protein, 185 aa, Artificial Sequence
  Synthetic
STEEVLKEIRDRLEELKREAKKVNDDTRERLKELEERNRRANEESKRRLEELERRVEERGTSEDMRRELERLRREADKTNEDDKRRTEELSKEVEDTNKRHEEELERLLTEVEKSLRRMEEENSEDERLLRELRRKLKEVEDTIRELNERLRKRIREIEEEVRESNERLRKKLREILEEIKETEK

SEQ ID NO: 12757 - protein, 185 aa, Artificial Sequence; identical to SEQ ID NO: 12756
  Synthetic

SEQ ID NO: 12758 - protein, 178 aa, Artificial Sequence
  Synthetic
SVVEEIDKIIKRIADRVRKIIEDLERLNKEIADLLRRIIEELKRLNDRIREEVDRLRRRGRDEEKKLADLIRTIAEVHKRAKEDIDRIAEKLRRAHTEVEKEVRKLEKELRDILRKVRDDVDEKVLEDVERKLERLKREVRRVLEESRKRLKEWKDRAREVLEESKRSLEEISRRLRE

SEQ ID NO: 12759 - protein, 178 aa, Artificial Sequence; identical to SEQ ID NO: 12758
  Synthetic

SEQ ID NO: 12760 - protein, 178 aa, Artificial Sequence
  Synthetic
SADETLRKVVEEVARKSEKLNKELEKVNKDLARAVEELIEELKDVITKIEERAKRLKDRGEPLEEEVRKLKEEVRKILKELEDRLRELEKRARDIHREVKKTDEDLRRRLEELLRRVKDRVDERVLEEIRERIERLNKRNKEVLDRSEESLRRLAEKLRRVIERVEEKLRKIEEDLKT

SEQ ID NO: 12761 - protein, 178 aa, Artificial Sequence; identical to SEQ ID NO: 12760
  Synthetic

SEQ ID NO: 12762 - protein, 175 aa, Artificial Sequence
  Synthetic
DKEDAIRTAEKRIRDSERENEKVDEDYRRELKRSEDKNEKADKEYKRRIEELVRRLLETRGREDEELRKLTEDSKRLSEENKKIVEDLKRDSEELLKRNEKLLRELKEEVREVKKEGRDEDTLRKLVDDIEERNRRIIEELKRHLDKLREDNERVIEELKRHLEEVAREVERRRK

SEQ ID NO: 12763 - protein, 175 aa, Artificial Sequence; identical to SEQ ID NO: 12762
  Synthetic

SEQ ID NO: 12764 - protein, 172 aa, Artificial Sequence
  Synthetic
SEKEEAEKLLREHHEKIKRLKEESKRINDENRKRIEELKRRSREINKELEEKVRRNDKDRKVIEKTLEEIERKHDELLKDAEDHHRRSEERHRELEDRVRKETRKVEDKLRKDGLREDTVKRIEDELKKNLDDLRRVLEKSKDDNRKLLEDLERELRESKKDARRLLEEVRK

SEQ ID NO: 12765 - protein, 172 aa, Artificial Sequence; identical to SEQ ID NO: 12764
  Synthetic

SEQ ID NO: 12766 - protein, 172 aa, Artificial Sequence
  Synthetic
SKEEELEKLLREHHEKIKRLKEESKRINDRIRRTVEELIKESEKINRDINDTVRKNDRDEKVIRRLLEDVRRKHEELRERLKRELDKVRERHKELLDRARRATERVKERLDRAGLREDSVERIKRELERNLDDLRRVLKESEDDLREILRRLKEVLEESERDLERVEREVRK

SEQ ID NO: 12767 - protein, 172 aa, Artificial Sequence; identical to SEQ ID NO: 12766
  Synthetic

SEQ ID NO: 12768 - protein, 176 aa, Artificial Sequence
  Synthetic
SELEELLERLERLIEENRRELEELIRELKEESDRTREELKRLIDRLKEKIDRVLKLKEDGRSREEEVRKIEEDIKKEIREMEERHEETKKRIEEKKKEADERHEELRERIKKEERDIPVDKDVLKEARERLRKLHEETKEAKKDLDRILDENEKEVKEVKKRLEDLLKELRDRLRK

SEQ ID NO: 12769 - protein, 176 aa, Artificial Sequence; identical to SEQ ID NO: 12768
  Synthetic

SEQ ID NO: 12770 - protein, 171 aa, Artificial Sequence
  Synthetic
SELEEVLKRIREEAERLMRRNEETLRRVKKTIEDLLRRNEKRLEDVKREADEIEKRKLDEDEVRKEDKRIEEEIKKLSDDSRDMERRIEEEIRRLEEDHKKKRRDTRERLKKAKLSERVKEEIERIEKRVREVHEEVNKRIEDLRREYRKEHKRVEDEIRRILREVREKRR

SEQ ID NO: 12771 - protein, 171 aa, Artificial Sequence; identical to SEQ ID NO: 12770
  Synthetic

SEQ ID NO: 12772 - protein, 179 aa, Artificial Sequence
  Synthetic
SEKEEVKKESEKLSRDTKKRSDEVHKEIKRLTDETERELREVEKEIERLAEELRRQNSVDERLAEELEREREKLREDLRRLKERYDRKLEELKERNKKEKKEYEDRVERTRDERDRNDTSEKVLEDELRENKKENKDLKERHDRTLEEVERTNRKVKEELRRVLRRVEESVREVAERAT

SEQ ID NO: 12773 - protein, 179 aa, Artificial Sequence; identical to SEQ ID NO: 12772
  Synthetic

SEQ ID NO: 12774 - protein, 186 aa, Artificial Sequence
  Synthetic
SKEETIEKRVEELKRENDEKVERIKREIEDLIRRNKELLERIKKEVRELLKELKDRAEKKGTSEDERRKLEDMERRIREKERKSEEDHRREEERLREETKRSEDRTRDLKRKIEEDERRLKKKDGKDRELDKALEDIERRIREHNKELDDELRKVREDSRRHLEKLKRELEEIREEARRITEELKK

SEQ ID NO: 12775 - protein, 186 aa, Artificial Sequence; identical to SEQ ID NO: 12774
  Synthetic

SEQ ID NO: 12776 - protein, 182 aa, Artificial Sequence
  Synthetic
EEKELLDKLKEDADRIKKELEDTLRELKKKHDDVNDRNRKHHEEVRRRAEKIKDKLRRDKVDEDEKRRIEEELRRLDEKSKKDEDRLKDEHEEITRELEKKKRDTRERIKKIRKDTEDKLRTKGTTGEEVRKRLDDLEREIKKIIDEIDERHRRLTEENKRSLDRDREELEKLKEEIKRTAD

SEQ ID NO: 12777 - protein, 182 aa, Artificial Sequence; identical to SEQ ID NO: 12776
  Synthetic

SEQ ID NO: 12778 - protein, 175 aa, Artificial Sequence
  Synthetic
DEAEKIKEDAKRLIEENDEIVRRIEEEMKKSHKENREILKKIKEDVDRSHEDLRRRSGDTDELREDKKKNEEDARRTEEDTRRAEKENKEETDKMRRDTEEDRKELKRKLDEVRKKGFREEVLKDLRRRSEEHKKKLEDDLRRHEKKSRDHKEKLKELLERHKRRVEEVRKRETK

SEQ ID NO: 12779 - protein, 175 aa, Artificial Sequence; identical to SEQ ID NO: 12778
  Synthetic

SEQ ID NO: 12780 - protein, 182 aa, Artificial Sequence
  Synthetic
SREELMEELERLLERLIREIEKASRENEERVKELKREIEESTKRNKETAKKLLDELTRSNSDEKVKRDLDRRLKELKDRNRKEEEDTKRRLEKLEKDNRDRERETDEREKEITRKVEEDVRREKKPKDELRKTLEDIRRRVEEAKERHRRILKTIKERSEKLTREHRKVNEDIEEKLRRAKK

SEQ ID NO: 12781 - protein, 182 aa, Artificial Sequence; identical to SEQ ID NO: 12780
  Synthetic

SEQ ID NO: 12782 - protein, 176 aa, Artificial Sequence
  Synthetic
SERETVERVLDRLREELEKIKKELEDVNRESKKEVERLLRRNEELHKKVEKDARDILRKKGETREDVRRELEKERRRSEDESRRLKEEDEREKKKSEERMRELDKDVKRKEDELRKKDLVGEELKKTLDKILEDAKEEVREDRKRNEKLNRELEERSRRNEEDLRRLLKKLKDEAD

SEQ ID NO: 12783 - protein, 176 aa, Artificial Sequence; identical to SEQ ID NO: 12782
  Synthetic

SEQ ID NO: 12784 - protein, 173 aa, Artificial Sequence
  Synthetic
DEKETIEERRKEIEKIIKDLEKNVRDHEKRIEEIIKEIRDNTEKLKKEAEDLLRRIRKEGNRDELRRRKEKRDRDSRRRMEEIKKRTDELAREHEETKRKIKEEEDERKERTKGKPTSRELEETLRRLDERTKKVIKEAEDVHRRLRERLRKIEKEHEDTLRELKKRLDDEAR

SEQ ID NO: 12785 - protein, 173 aa, Artificial Sequence; identical to SEQ ID NO: 12784
  Synthetic

SEQ ID NO: 12786 - protein, 186 aa, Artificial Sequence
  Synthetic
SAEDRLREADERYERELRRLKRELEEVIKEYRKAIEELKKELEDVLRRFREELKRLEEEKGTTSKEMDELKKRVEEEERKKKEEIDRNREENERRLKKVEDDTTRKEEDNRRRRKKVRDDITRRKGSGEEVREIIERLKESLKRNEEDVRRLIRRLKEELKRNKEEVERLKKELEDILRELADRAR

SEQ ID NO: 12787 - protein, 186 aa, Artificial Sequence; identical to SEQ ID NO: 12786
  Synthetic

SEQ ID NO: 12788 - protein, 186 aa, Artificial Sequence
  Synthetic
DAERELKKVEDEYEKRIRDLERDLRRVLEEYERAIEELKKELDDVLREAEKALEDLLRKKGENSEEVKEEEDRVRRKLERVREETKKNKRENDERLKRTREEMDENRKRNEKKRREVRDKIEKDKGSGEEVKEIKKELEESLKRNEDKVRELKRRLEELLKENEKKVRELIRRLEEELRRLAERTR

SEQ ID NO: 12789 - protein, 186 aa, Artificial Sequence; identical to SEQ ID NO: 12788
  Synthetic

SEQ ID NO: 12790 - protein, 186 aa, Artificial Sequence
  Synthetic
SAEEELKKVDDDYEREIRRLEKELEDVLRDVDRDHRRLEEELKKVIRDIEEALKDLLRKKGEETEELKKMAEDVRRRLEEVRRRIEKDKEDNKRKKEEIEKEIRDNREKNKRDRDRTRDKIRKDKGRGEEVREIKERLRKSLEDNERKVKEIIDRIREDLKENRDRVRKLIKDLDDELKELAKKAK

SEQ ID NO: 12791 - protein, 186 aa, Artificial Sequence; identical to SEQ ID NO: 12790
  Synthetic

SEQ ID NO: 12792 - protein, 179 aa, Artificial Sequence
  Synthetic
DEEREIEERIKRILEDLKRNLEDNERKIRKIVKDNRENNKRNEDKIRRILEELKRAKEEGNLTDDKLRRTEEETKRNSERNEEESRRTEDRERRNTERNEKKERDTREETKKDRERLRERGVETERVRKLEKDLEKALEEIRRRYEELLKRLKRENEESKKTYDKLIEELRRAAREIKR

SEQ ID NO: 12793 - protein, 179 aa, Artificial Sequence; identical to SEQ ID NO: 12792
  Synthetic

SEQ ID NO: 12794 - protein, 179 aa, Artificial Sequence
  Synthetic
DEKERIEEEIRRILRELEELTERNEKKIRDIVREIRKNSEENRRKIEKILEELEELKKEGSNTEETAKRKREEVDRNRRRNEEKARRIEEELRRNKEENDKRLEDTERELEKRRRDVRRRGVEDEEVEELLRRLRKRLEDLERRNKELLEELKERLERAEKRNRDLLKELEDALERIRK

SEQ ID NO: 12795 - protein, 179 aa, Artificial Sequence; identical to SEQ ID NO: 12794
  Synthetic

SEQ ID NO: 12796 - protein, 179 aa, Artificial Sequence
  Synthetic
DEEEEIEKKLRKNIRDAEEKTKRNKERAEDNLRKARENSKRNEEDIRRKLKRLKELKEEGNQRDEDDRRTREDSKRNEDDNDRKRRESEKDHKRNREKNKEDKERSRKRHEEETEDLKKKGLRTERVDRLKKELERMHRKLDKENRDIEKRVREEHRRLTERNRKLLEDLEEALERIRT

SEQ ID NO: 12797 - protein, 179 aa, Artificial Sequence; identical to SEQ ID NO: 12796
  Synthetic

SEQ ID NO: 12798 - protein, 179 aa, Artificial Sequence
  Synthetic
SEEEEIERRLRDNIRKAEENTRRNKEKIDRILEEMRENSKENKRRIEEILDELRKLKEEGNLTEEEAKRVREELERNKRRNDEKLERKRKDIDDNERRNREKEEKSRRDHEEETKELEKRGVRTERVDELKEKVERDHERLRKENEDLLRELRKRLDELRRENEKLLRELEEALDRIRK

SEQ ID NO: 12799 - protein, 179 aa, Artificial Sequence; identical to SEQ ID NO: 12798
  Synthetic

SEQ ID NO: 12800 - protein, 184 aa, Artificial Sequence
  Synthetic
SELERVREEIRRLERENEETLREVEEKIRKLLEENREALERVEERVRRVKEELKEVRRRQLDREELKKVEDELRRREEKIRREEDERRRRSEEDRKEEEKRTRRRSEDSERKREKTRRDISRVKDDDVRRDIERLDEEYERRHKDVNRKLKRLDDEYEKATRDVRRRLEELTKELRDEAEKVRK

SEQ ID NO: 12801 - protein, 184 aa, Artificial Sequence; identical to SEQ ID NO: 12800
  Synthetic

SEQ ID NO: 12802 - protein, 175 aa, Artificial Sequence
  Synthetic
SERERVDRLEERYEEESRRVEEELRRLLKRYEDFHRELRKRLEDIVREVRKTLKELEDRIDEEVVRTTEKRLEDLRRDLERRSRETEKRLKEIEDRLREEKEKSERDRERTKKLEDEIDTREIEKRVERLLEENEERLRRVRKEIKKALDENREILKEVEDRARKILEELRRKAK

SEQ ID NO: 12803 - protein, 175 aa, Artificial Sequence; identical to SEQ ID NO: 12802
  Synthetic

SEQ ID NO: 12804 - protein, 185 aa, Artificial Sequence
  Synthetic
SELEEVKRRVEEIKKKLKEDLDDHKRRNEKHIKELEDRLEEHRREIEELVRKLEELKRRNVDEETMKRVKEELEEMARRSKEREKDLRRRSEEAHRKSERDLEEAEKKLEEERKRIRDRARRRNSDEEVRKALKELEDDLRRVLEEIKRAHKKSKEDNKRVLDDLTEKHKRSEEELRDVLRDLER

SEQ ID NO: 12805 - protein, 185 aa, Artificial Sequence; identical to SEQ ID NO: 12804
  Synthetic

SEQ ID NO: 12806 - protein, 185 aa, Artificial Sequence
  Synthetic
SSLEELEKRNRERIEELERTLRELEERSRELNERLKRELDEHKKRIDELLEELRRLKEENVDEETLKRIEEKLRRDLRRSKERLREIKERLEREHKKIDDRKRERDKKSEKDKKDEREEVRRENSDEEVRRALEELEKSHDEVRERIKRRLDESKERNKRALEKIKRDHEESEERLRRALDRTRK

SEQ ID NO: 12807 - protein, 185 aa, Artificial Sequence; identical to SEQ ID NO: 12806
  Synthetic

SEQ ID NO: 12808 - protein, 185 aa, Artificial Sequence
  Synthetic
SSLEEVKKENEKLIKELKEELDKIRKENEEHIEKLERELERVKREAEKIKKKLEELKRENVDEKTLRELEKELRDRARKTKKETDELRRESEERHKRTDERERRLEEKSRRDERRTEDRVRREKSSKEVKDALEELKRSHRKVAKEIKEAVKESRKKNEEVAKKIKKALDELKRELDEALKEAKR

SEQ ID NO: 12809 - protein, 185 aa, Artificial Sequence; identical to SEQ ID NO: 12808
  Synthetic

SEQ ID NO: 12810 - protein, 183 aa, Artificial Sequence
  Synthetic
DEVETLEERVRRLKKELRDELKRNEDKVRKLKRELEESLKENAKKVEEVERDLERVKREGSDREEKRDERRRRTDKNREDNREDERRKEEDTEKNERDNERRTREVKRTADEDEKDLKRSNRETDEVRREIERLKRELERVIREYREAIERLKRDLKRAIDKYREDIKRLEEKLRRVDKELEK

SEQ ID NO: 12811 - protein, 183 aa, Artificial Sequence; identical to SEQ ID NO: 12810
  Synthetic

SEQ ID NO: 12812 - protein, 179 aa, Artificial Sequence
  Synthetic
SEVERVREENKRSEEKLKKLLEDSRRNLEENRKRLEELLRKSEENLERLKRELDELRKQNIKDSRDEKRTKDRLDRHREEVKRAEDRSREEHKRHKERVEREERKEERRNEEEEEDLRRKGVETEDLRRNRETNEELRDRVRRTHEKLEREAEKVHEDVRRRHKELEDEVREVLKELRR

SEQ ID NO: 12813 - protein, 179 aa, Artificial Sequence; identical to SEQ ID NO: 12812
  Synthetic

SEQ ID NO: 12814 - protein, 179 aa, Artificial Sequence
  Synthetic
SDEELIKRIREELERLLKELRDTIKEVEDRNRESLEDLDRVHKRIKEEIERLEKDLDVEEELLKRMREELTELHKENKERKERDEEKNRRVRERLEEEERKEEKEIRDVEREDKDSDRPSEELAKKLKDELRRAKDKVEEIKKRIRDTLEDNRKKAEELKRKNEEDLRRFEKKAEDVRK

SEQ ID NO: 12815 - protein, 179 aa, Artificial Sequence; identical to SEQ ID NO: 12814
  Synthetic

SEQ ID NO: 12816 - protein, 172 aa, Artificial Sequence
  Synthetic
SKEDKAREDVKRTIEELKDRNRKLNDKIRKTIEDLERRNEELNKENKDLVDELRDGDRRDEEIRKRSTEYRKRTEETDEEVERTERELRKELRDEDRKLKRRKDEIERKIREDNLPEEVLRELREEIEKLEKEHRDNVRKLERDLDRLRKKHEDNKERLERHTRRVEEEKRR

SEQ ID NO: 12817 - protein, 172 aa, Artificial Sequence; identical to SEQ ID NO: 12816
  Synthetic

SEQ ID NO: 12818 - protein, 179 aa, Artificial Sequence
  Synthetic
STEEDVRKIVDDARRNLEENKRRIEKIVKELEDKLRENEKKIRKILEDIRRLLEKFKRDDDKREEVEERIRTTKERTEDDTRRNTEENKKTSERKKKEIDDNSRRNEEKRKRIEDKERRDNLPEDIMRDLRRRLERIAREYKRLLDELKKRLDDIKKTYEDLLRRLREEIERAEEKARR

SEQ ID NO: 12819 - protein, 179 aa, Artificial Sequence; identical to SEQ ID NO: 12818
  Synthetic

SEQ ID NO: 12820 - protein, 179 aa, Artificial Sequence
  Synthetic
DEEEEVRKILEEIKKELDDNERRIRKNIRDAEETLRENEKRIRDILKEIEDLLKELKDRDDKREELEERIRREAKKKREELKRNEEDNERRREKSEREHRENSKRNKKRRDDTEERERRANLSEDILEKLRRDIERADEEYKRLEEELRRKHDEIRKTYEKLLKELEEAIERVEREAEK

SEQ ID NO: 12821 - protein, 179 aa, Artificial Sequence; identical to SEQ ID NO: 12820
  Synthetic

SEQ ID NO: 12822 - protein, 175 aa, Artificial Sequence
  Synthetic
SSKDLLEELRRTVEEVRKRSDDLSRESEEATRRVRKEHDRINKEVEDELRRVREDGERPKEAEEEAKEIRKKTEKETRDIREEIKRLRDEYEKTKKRLEDEKKKLEEDTEEIERRGSVSEDIVREMRKRLEELLRENEKRNEELLRRLKELLDRSRERVREIEERLRELLEEVRR

SEQ ID NO: 12823 - protein, 175 aa, Artificial Sequence; identical to SEQ ID NO: 12822
  Synthetic

SEQ ID NO: 12824 - protein, 182 aa, Artificial Sequence
  Synthetic
DAEKLKRDYEEKSRRVKETLDDLVRRYREEHRRVNEELRKLLEDLKKTVEDVEKEEGSSGEKARELEKTKKTLEEELKRIEEEVKEISERSKEKEERIKKEVKEIRDKSERDKKEIDDKRIDSERLEREIRKLEEENKRTLERVKEKIERLLEENEKVLKEVRDKVKTIKDRLRKLVEEIRR

SEQ ID NO: 12825 - protein, 182 aa, Artificial Sequence; identical to SEQ ID NO: 12824
  Synthetic

SEQ ID NO: 12826 - protein, 175 aa, Artificial Sequence
  Synthetic
SVEDEVRKIKRRLEEALERSEKKVRDMVRRNKEFLERAKRRVEEVVKENERALEEVKRRGNGEKELEDLHRKNREDKERERKDARKLHEDNRDEHRKHEEELRKLRRDLERKEKDADIDEEILRRVRKTVKDVEDTLKELNDRLEKIHREVKKELDRLLKELDDRHRKVAEDLKK

SEQ ID NO: 12827 - protein, 175 aa, Artificial Sequence; identical to SEQ ID NO: 12826
  Synthetic

SEQ ID NO: 12828 - protein, 180 aa, Artificial Sequence
  Synthetic
SVEELLRKLEEVLRKIREENERSLKELRDRAREIVKRNRETNRELEEVIKELEKRLSGADKEKVEELVRRIRRIVERVVEEDRRTVEEIEKIAREVVKRDRDSADRVRRTVEDVLRKATGSEDIVRKIERIVETIEREVRESVKKVEEIARDIRRKVDESVKNVEKLLRDVDKKARDRKK

SEQ ID NO: 12829 - protein, 180 aa, Artificial Sequence; identical to SEQ ID NO: 12828
  Synthetic

SEQ ID NO: 12830 - protein, 172 aa, Artificial Sequence
  Synthetic
DEVEKVLEEIKRALDDLRKKVEESKREIKEALKAVEKHTRDSDTANKRTLAEIERGVKSKDTERVRKLVEELSEENERSLREVRRVAEELLEINERVLEEVERVVEALLDLVRRGGSERVVEEVRRVLEELRRRLEKVTEDSRRAIERLAREDARVSKKSIDVNKKLDDDVR

SEQ ID NO: 12831 - protein, 172 aa, Artificial Sequence; identical to SEQ ID NO: 12830
  Synthetic

SEQ ID NO: 12832 - protein, 178 aa, Artificial Sequence
  Synthetic
DAEELVRELEERIKRSHERLEELLREVKRLIERSHEELKRLNEEVLRELDRVLDEVAKRGSDSEELLRELEERVARIKERSKESYARSKESLDRAKEVLEELYRASKRSLEEFERELREKGVDKDSARELERIVKENAELAERVFREVEKIVRENTKLAEDSVRELKRLVEELKKRAK

SEQ ID NO: 12833 - protein, 178 aa, Artificial Sequence; identical to SEQ ID NO: 12832
  Synthetic

SEQ ID NO: 12834 - protein, 177 aa, Artificial Sequence
  Synthetic
SAADEVVERMKELVATVKRENDEVVKELKKLVKELEDDNRRVVEESKKSVEDLARRVGKDKREVVEEVRRTSKELVERNEETAKRVDDLVRRLVEENRRSVTEVEELVKELVKELRRGSGSEDLVREVEKRVRDIVEESRKLAEETRKAVEDIIEKSKRIAEDTLEKNKEMVERLER

SEQ ID NO: 12835 - protein, 177 aa, Artificial Sequence; identical to SEQ ID NO: 12834
  Synthetic

SEQ ID NO: 12836 - protein, 174 aa, Artificial Sequence
  Synthetic
SESDEVIRDLARLLDELARHVDDSVRRMDEVVKRSTREADELAKRLDELVKEVEKKPGDERVERMVAEIERLVAEVLEELKKKYEKLKREVEENLRRLEETVRDIVEKARKVTEKGVSKEKIDRIIRELERILEEAKKKHEDVLRRLEDSLRRVAELLKAALDRLREIVDRLRR

SEQ ID NO: 12837 - protein, 174 aa, Artificial Sequence; identical to SEQ ID NO: 12836
  Synthetic

SEQ ID NO: 12838 - protein, 174 aa, Artificial Sequence; identical to SEQ ID NO: 12836
  Synthetic

SEQ ID NO: 12839 - protein, 174 aa, Artificial Sequence; identical to SEQ ID NO: 12836
  Synthetic

SEQ ID NO: 12840 - protein, 174 aa, Artificial Sequence
  Synthetic
SESDDVIRKLRELLEELRTHVEKSIRDLRKILEDSTRHAKRSIEELERLLEEVRKKPGDEEVRKTVEEISRRVAENVKRLEDLYRRMEEEVKKNLDRLRKRVEDIIREVEEARKKGVDEEKLKDLIRKLRDILRRAAEAHKKLIDDARESLERAKREHEKLIDRLKKILEELER

SEQ ID NO: 12841 - protein, 174 aa, Artificial Sequence; identical to SEQ ID NO: 12840
  Synthetic

SEQ ID NO: 12842 - protein, 174 aa, Artificial Sequence; identical to SEQ ID NO: 12840
  Synthetic

SEQ ID NO: 12843 - protein, 174 aa, Artificial Sequence; identical to SEQ ID NO: 12840
  Synthetic

SEQ ID NO: 12844 - protein, 178 aa, Artificial Sequence
  Synthetic
DREREVKKRLDEVRERIERLLRRVEEESRRVAEEIRRLIEEVRRRNKKVTEEIRELLKGLKDKEEVRRVLERLRKLNAESDELLERILERLRRLVEATNRLVKAIIEELRRLVEKIVREVPDSEELREELKKLERKIEKVAKEIHDHDKEVTERLEDLLRRITEHARKSDREIEETAR

SEQ ID NO: 12845 - protein, 178 aa, Artificial Sequence; identical to SEQ ID NO: 12844
  Synthetic

SEQ ID NO: 12846 - protein, 178 aa, Artificial Sequence; identical to SEQ ID NO: 12844
  Synthetic

SEQ ID NO: 12847 - protein, 178 aa, Artificial Sequence; identical to SEQ ID NO: 12844
  Synthetic

SEQ ID NO: 12848 - protein, 181 aa, Artificial Sequence
  Synthetic
SEVDEAVKNNEEDAKESRRVVEEAVKRDEDIARDIERAAREVVERDKEIVDEVRRGVKDEKKLREVVTLSKKIVDETKEIADRVLELSKRIVKETRDIAKRVLKLNDDSVKDVRRIAREGRSKETKDLLDENSKRSNEISREVKKDLERTVRENKKIVDEVAKALEDTVDKNRRIVEEVTT

SEQ ID NO: 12849 - protein, 181 aa, Artificial Sequence; identical to SEQ ID NO: 12848
  Synthetic

SEQ ID NO: 12850 - protein, 185 aa, Artificial Sequence
  Synthetic
SEAEELLKRLEDRAEEILRRLEEILRTSRKLAEDVLRELEKLLRESERRIREVLEELRGIKDKKELEDVIREVEKELDESLERSRELLKDVLKKLDDNLKESERLVEDIDRELAKILEDLKKAGVPKEVVDEIKRIVDEVRERLKRIVDENAKIVEDARRALEKIVKENEEILRRLKKELRELRK

SEQ ID NO: 12851 - protein, 185 aa, Artificial Sequence; identical to SEQ ID NO: 12850
  Synthetic

SEQ ID NO: 12852 - protein, 172 aa, Artificial Sequence
  Synthetic
SRAETVLKEVTDKIKKLADSSDELLRRNKENIDELKKSSEELLRRLTKAIEEIEKGSVDEETLEELIRRVEAELEAHHRELEKNSREDEKRNRDHHAKLEEEMRRVEERLEREGIDDEVVKRVRDLLDTVRRRNEKVNEDVKRMNDKLRRDNEDVIRRVEKLLRELEEKRRT

SEQ ID NO: 12853 - protein, 172 aa, Artificial Sequence; identical to SEQ ID NO: 12852
  Synthetic

SEQ ID NO: 12854 - protein, 172 aa, Artificial Sequence; identical to SEQ ID NO: 12852
  Synthetic

SEQ ID NO: 12855 - protein, 172 aa, Artificial Sequence; identical to SEQ ID NO: 12852
  Synthetic

SEQ ID NO: 12856 - protein, 177 aa, Artificial Sequence
  Synthetic
DEVRELLERNRRLLEEIKKTVKDLIRANEELLKRIEDDAKRLIDRNEELLDELEKGLSDDETIREAKERLKASLEDVKRRVEEVKRLLEKSLEEVETIIREAEKRNRDSLREMERRGSSEELEELRRVVEESDETIKRLLEEAKESVDRSLDRIRKLLEDVRRSVERSAKRIDEKRK

SEQ ID NO: 12857 - protein, 177 aa, Artificial Sequence; identical to SEQ ID NO: 12856
  Synthetic

SEQ ID NO: 12858 - protein, 180 aa, Artificial Sequence
  Synthetic
STEEVLDEIRKLHKTLTEDIKRVLREIEELHRRTIEENKEVLDKIAEDYKRVIDDVRTKDTPNVEKLLKDLEKSAKENIEHNERTLREDDRVLKEIRRRATELLKANEEMLRRIEEVARKGGVDAEELLRESKEAIKEVKRVLEELRKESKRVVDETRKLSEENLEHSERVLRKVEEDLR

SEQ ID NO: 12859 - protein, 180 aa, Artificial Sequence; identical to SEQ ID NO: 12858
  Synthetic

SEQ ID NO: 12860 - protein, 188 aa, Artificial Sequence
  Synthetic
SEIEKILKEIEDLARRDEEVSKKIVEDIRRLAKEVEDTSRDIVRKIEELAKRVLDRLRKDGSKEELEKEVREVVKTLEELVKDNHRLIRRAVEEMKRLVEENHRHSREVVKELEDLVRELRKGSGSEDSERLVREVEDLVRRLVRRSEKSNEEVKRTVEELVRRMEESNDRVRDLVRRLVEELKRAVD

SEQ ID NO: 12861 - protein, 188 aa, Artificial Sequence; identical to SEQ ID NO: 12860
  Synthetic

SEQ ID NO: 12862 - protein, 178 aa, Artificial Sequence
  Synthetic
SEAEKAKETIDRLADRVRKLLEEIKRSLDDSRRKSKETVEENEKTLDRMRKEVDAAKRGSVSEEELERLIRKLKKTLDELRRRHEKLVEDLRRNLERIKRRLEELTREMRETLERLAREGLDEEVLRTLEEIIRRLTKELEDVLREYERELRRLEEENKRVIDKTEEEIRRLADRLRR

SEQ ID NO: 12863 - protein, 178 aa, Artificial Sequence; identical to SEQ ID NO: 12862
  Synthetic

SEQ ID NO: 12864 - protein, 178 aa, Artificial Sequence; identical to SEQ ID NO: 12862
  Synthetic

SEQ ID NO: 12865 - protein, 178 aa, Artificial Sequence; identical to SEQ ID NO: 12862
  Synthetic

SEQ ID NO: 12866 - protein, 179 aa, Artificial Sequence
  Synthetic
SEVEELIKRLAKVLKELVDKVRKVIEDTKELLERLKRRSEDHIRKLREVLKEAKDQPIDDEELKEILDRLRKTLEELEEELKKALEDDREEAKRLVDDARRVLKELEEEVREIRERRGESEELDRRIEKVLKEIEEKIREVIKEWERVHREVEELLKRLIDENRKVLDEIRKLLEEKSK

SEQ ID NO: 12867 - protein, 179 aa, Artificial Sequence; identical to SEQ ID NO: 12866
  Synthetic

SEQ ID NO: 12868 - protein, 179 aa, Artificial Sequence; identical to SEQ ID NO: 12866
  Synthetic

SEQ ID NO: 12869 - protein, 179 aa, Artificial Sequence; identical to SEQ ID NO: 12866
  Synthetic

SEQ ID NO: 12870 - protein, 182 aa, Artificial Sequence
  Synthetic
SELEEIEKKVRELTKRHRELVERVRKTVKELIETNRRLLETLTERIKRVLEEVRDLERRGEPKEDLKARLEDIIRRLAEDIERVKRETDKLLEELARIIEEVEKEMRETNKELDKEIKDGGLDDKALEEAKRVLAENNEVIKDIKRALDELLKELEKSVRESEERLRRLLEEVKRVIEEVAT

SEQ ID NO: 12871 - protein, 182 aa, Artificial Sequence; identical to SEQ ID NO: 12870
  Synthetic

SEQ ID NO: 12872 - protein, 186 aa, Artificial Sequence
  Synthetic
SEAERLEARARELLRANEELMDDLRAKAEELLKRNDRLVKEIEKKVREVLAAIEELKRRGEPKEEVARKIEEILRRLEETLRRIKEESDRLDEELKRELERVKRESEELDRELRKLIEDVERRGSGSKRLEELLRRLNEEHKRISDELRKLLDEALEAHRELSRRLEEELERLLREIERLVEEVTR

SEQ ID NO: 12873 - protein, 186 aa, Artificial Sequence; identical to SEQ ID NO: 12872
  Synthetic

SEQ ID NO: 12874 - protein, 176 aa, Artificial Sequence
  Synthetic
SVDEVLKEIEDALRRLKEEVERVLKENEDELRRLEEEVRRVLKEDEELLESLKRGVGESDEVDRVVDEIAKLSAEILEKVKKVVKEIRDSLETVKRRVDDVVRRLKELLDEIKRGSDEKAIRDVAKEIRDRLKELEEEIEEVTRRNLKLLADVEEEIRRVHEKTRRLLETVLRRAT

SEQ ID NO: 12875 - protein, 176 aa, Artificial Sequence; identical to SEQ ID NO: 12874
  Synthetic

SEQ ID NO: 12876 - protein, 184 aa, Artificial Sequence
  Synthetic
DDLERAREEVADLIRKHEEKTRRILEESRRLNERHRELSARILDEIRKLAERIEELIKRERGKDELRRKVEDLEARVEDLIRRLEEHLRRVHDKDRRLIEDLRRHLKRVVEELKRLIDELRRGVPKEELDRIEEELKRLIDTLREKNREVEKRARDSNRDLKRTNDEIAKEVRELIKKLREDLK

SEQ ID NO: 12877 - protein, 184 aa, Artificial Sequence; identical to SEQ ID NO: 12876
  Synthetic

SEQ ID NO: 12878 - protein, 174 aa, Artificial Sequence
  Synthetic
KEVEDAVKELEDLLRANEDKTRSIVEDMRASNKDLEDHSRASEEEVRKLLDDLRRAGVPRDSLKRLAEDVERVTRESRELLERVHRADRELIERLKESNERLRRAIEEIRKAIKGGSDIKTLLDRVRKLAEEDAERLDRLRRESEELNERVRRVDKKLLEEIRRKAKKVEDDTR

SEQ ID NO: 12879 - protein, 174 aa, Artificial Sequence; identical to SEQ ID NO: 12878
  Synthetic

SEQ ID NO: 12880 - protein, 174 aa, Artificial Sequence; identical to SEQ ID NO: 12878
  Synthetic

SEQ ID NO: 12881 - protein, 174 aa, Artificial Sequence; identical to SEQ ID NO: 12878
  Synthetic

SEQ ID NO: 12882 - protein, 174 aa, Artificial Sequence
  Synthetic
DEEEDLERAIKKLLDENRELLKRIAEELRRLLEELRRLTEESADRLRRLLKELKDRGVPEEDLADVAEKVKKVLKESEDSNADVARKLEKLLRDLERSTERLEREARKVRKLLRGGKDAETLLRELEKLSRDNKELLKKIEKEIRDLIKEDKERNIELSERLRKLVEELKKKAT

SEQ ID NO: 12883 - protein, 174 aa, Artificial Sequence; identical to SEQ ID NO: 12882
  Synthetic

SEQ ID NO: 12884 - protein, 174 aa, Artificial Sequence; identical to SEQ ID NO: 12882
  Synthetic

SEQ ID NO: 12885 - protein, 174 aa, Artificial Sequence; identical to SEQ ID NO: 12882
  Synthetic

SEQ ID NO: 12886 - protein, 178 aa, Artificial Sequence
  Synthetic
DDAERILREMERLLEENKEISDEIAKELKRLLDENRKLSEDVVKALEDLLRDLERRSGVSEEVLKRVREVLERIKRELDRSDDELRKVAERILRDAERSNDELRKVIEEIEEELRGSRDKDTLRELARSIRKLSAENKERLKELLRELKKLSDENKERIKKLLSDAEKIIEDVARRAK

SEQ ID NO: 12887 - protein, 178 aa, Artificial Sequence; identical to SEQ ID NO: 12886
  Synthetic

SEQ ID NO: 12888 - protein, 177 aa, Artificial Sequence
  Synthetic
SSEERLRAVIEDLKRLAEESRKRHKELIDELAKAVERIERRHKKLLDEIKAVVDDIRRGVSEELLKRIEEVLDEIRKELEENIKRIRKVLDELRRTSEENIARIEKVLRELEDLVRKGGSDADTIIEEVKRVLEELARSTEEVEKRVRDAIEELERSSEELARRIKEVLKRLEEETR

SEQ ID NO: 12889 - protein, 177 aa, Artificial Sequence; identical to SEQ ID NO: 12888
  Synthetic

SEQ ID NO: 12890 - protein, 178 aa, Artificial Sequence
  Synthetic
DEARELVKELEDLIREITKTVRRLLEESEELIKRIDDAVDDLRRADEDLNREIKEEIEKGKSKESLEALIERLKESLERVKRTIEKLIRDLERLNEKLRRDVESLVAELEKILSKIKRGGLDERILRELEERVKELEKEAREILKRSEDETDKLREKAERILEDLERANRRTMDEARR

SEQ ID NO: 12891 - protein, 178 aa, Artificial Sequence; identical to SEQ ID NO: 12890
  Synthetic

SEQ ID NO: 12892 - protein, 178 aa, Artificial Sequence; identical to SEQ ID NO: 12890
  Synthetic

SEQ ID NO: 12893 - protein, 178 aa, Artificial Sequence; identical to SEQ ID NO: 12890
  Synthetic

SEQ ID NO: 12894 - protein, 184 aa, Artificial Sequence
  Synthetic
DEIRKVVKEITDLLKASNDKNRKVVEEIRDLLRKSKKLADELVERLRALVEDLRRRIDKSGDKETAEDIVRRIIEELKRILKEIEDLARRINREIERLVEEVERDNRDVNRAIEELLKDIARRGGSEDLKRVEERAREVSRRNEESMRRVKEDADRVSEANKEVLDRVREEVKRLIEEVRETLR

SEQ ID NO: 12895 - protein, 184 aa, Artificial Sequence; identical to SEQ ID NO: 12894
  Synthetic

SEQ ID NO: 12896 - protein, 184 aa, Artificial Sequence; identical to SEQ ID NO: 12894
  Synthetic

SEQ ID NO: 12897 - protein, 184 aa, Artificial Sequence; identical to SEQ ID NO: 12894
  Synthetic

SEQ ID NO: 12898 - protein, 176 aa, Artificial Sequence
  Synthetic
STAETVEKKVEEVIRENEKSMRESEEKVDRSTKRIEDVLRRLEETIRKTSDDIAKGVKGERVKEVLEENRRLLEEAKKLVDEVLETNKKLLEDDKRLNEEVSKTLKKLLEEIKSVDTREDATRVIEEAKRILDEARKLNEETIRRSEELVRRIERVIEEIIKRSEKLLEDVARESK

SEQ ID NO: 12899 - protein, 176 aa, Artificial Sequence; identical to SEQ ID NO: 12898
  Synthetic

SEQ ID NO: 12900 - protein, 176 aa, Artificial Sequence; identical to SEQ ID NO: 12898
  Synthetic

SEQ ID NO: 12901 - protein, 176 aa, Artificial Sequence; identical to SEQ ID NO: 12898
  Synthetic

SEQ ID NO: 12902 - protein, 176 aa, Artificial Sequence
  Synthetic
STAETVAEEVERVLKHSDDLIKEVEDVNRRVEEEIKRVIRELEEENERLVAEVRKGVKGEILAEIEKRLADNSEKVREVAERAKKLLEENTARVKDILRESRKLVKDLLDEVRGTGSEEAAREIIKRLREVNKRTKEKLDELIKHSEEVLERVKRLIDELRKHSEEVLEDLRRRAK

SEQ ID NO: 12903 - protein, 176 aa, Artificial Sequence; identical to SEQ ID NO: 12902
  Synthetic

SEQ ID NO: 12904 - protein, 176 aa, Artificial Sequence; identical to SEQ ID NO: 12902
  Synthetic

SEQ ID NO: 12905 - protein, 176 aa, Artificial Sequence; identical to SEQ ID NO: 12902
  Synthetic

SEQ ID NO: 12906 - protein, 182 aa, Artificial Sequence
  Synthetic
DEVREVAERLRRLVDESRKRNEEVIKESEALVDRVRKTNEEVMKRLRELIDKLEKDIRRSGDKETVEKIIREVLSAIDELLKRVERTNAEISKENARLLDEVRKTNEEISRRLAKLLEDIRRGSGDAETIERVVRELLEENKEVLRKTEEAVKRSTETNKRLLEASKEVADRLRERIKEAAK

SEQ ID NO: 12907 - protein, 182 aa, Artificial Sequence; identical to SEQ ID NO: 12906
  Synthetic

SEQ ID NO: 12908 - protein, 186 aa, Artificial Sequence
  Synthetic
SRVEEIIEDLRRLLEEIRKENEDSIRRSKELLDRVKEINDTIIAELERLLKDIEKEVREKGSESEEVKKALRAVLEELEKLLRRVAEINEEVLRRNSKLVEEDERRNREVLKELARLVEELIREIGDEDKARKVAEVAEKVLRDIDKLDRESKEAFRATNEEIAKLDEDTARVAERVKKAIEDLAK

SEQ ID NO: 12909 - protein, 186 aa, Artificial Sequence; identical to SEQ ID NO: 12908
  Synthetic

SEQ ID NO: 12910 - protein, 186 aa, Artificial Sequence; identical to SEQ ID NO: 12908
  Synthetic

SEQ ID NO: 12911 - protein, 186 aa, Artificial Sequence; identical to SEQ ID NO: 12908
  Synthetic

SEQ ID NO: 12912 - protein, 186 aa, Artificial Sequence
  Synthetic
SEVDEIIKELERLLAEIARENERIIRESRKLADEVRKRNEDAIRKLEELVARLADAVRRKGSESEEVKKLIEDVLREIERLLKRIEEENREVVKRNSELVERVRAINEEILRRVAELVEKIARDIGDKDEVTKVKKVADDVLAEIKKLDDETRRVIEDTNKKIADLDKATRDVVRKVLEEVKKLEK

SEQ ID NO: 12913 - protein, 186 aa, Artificial Sequence; identical to SEQ ID NO: 12912
  Synthetic

SEQ ID NO: 12914 - protein, 180 aa, Artificial Sequence
  Synthetic
REVEEMIKELEELLKDLKEKNERASKRNRELVRRLEEENKRVIEELKKLVKELEDLVRSGEDEEVLREVLKRLEEVLERVRALNERVLEAIEKSLEEVKASNEAVKRRLKELLEEAERGVDSEKLKELRDVIAEVAKRIDELDEYTRESIRRAKKEIERLNRETKKVIEEVVKRIEEERK

SEQ ID NO: 12915 - protein, 180 aa, Artificial Sequence; identical to SEQ ID NO: 12914
  Synthetic

SEQ ID NO: 12916 - protein, 180 aa, Artificial Sequence; identical to SEQ ID NO: 12914
  Synthetic

SEQ ID NO: 12917 - protein, 180 aa, Artificial Sequence; identical to SEQ ID NO: 12914
  Synthetic

SEQ ID NO: 12918 - protein, 181 aa, Artificial Sequence
  Synthetic
DAVEEAEKLIRKVIADSEKLLRDLADLNAKSIRRSEKLVEDDRRANEDVIRKLEELRRNGGSEEELRALLKEVEDTNRASHETNKRLLDEDRALNKEVHDRNEKLLRDIKRLVEEVAKGIDSEELLRRIKKLLDEIKKAIEDSSREIKRLLEESERVMKRSSEDIKRTLDDTRRVVEEVRR

SEQ ID NO: 12919 - protein, 181 aa, Artificial Sequence; identical to SEQ ID NO: 12918
  Synthetic

SEQ ID NO: 12920 - protein, 181 aa, Artificial Sequence; identical to SEQ ID NO: 12918
  Synthetic

SEQ ID NO: 12921 - protein, 181 aa, Artificial Sequence; identical to SEQ ID NO: 12918
  Synthetic

SEQ ID NO: 12922 - protein, 177 aa, Artificial Sequence
  Synthetic
SSDEVLKEIEEIIRRLEAEVRRVNAEVNASTEDLAREVEEVLRATNELIEELERRVTGTEELKRVIDELRDRDRKVRRRVERVIEESAKRDDESRKRLTRAVEKLRADLKKLADDGVPEEALSKAIKDVRDIVKKVKDELKEWRDRNKELVDRLSEELKEWLKDVERVLKELTDKDR

SEQ ID NO: 12923 - protein, 177 aa, Artificial Sequence; identical to SEQ ID NO: 12922
  Synthetic

SEQ ID NO: 12924 - protein, 175 aa, Artificial Sequence
  Synthetic
SEADDVLKKLAETVKRIIERLKKLTDDSRRLVEEVHRRNDKLSKESAEAVRKAEERGIDEKDVRKLLEDLKKKSEEVAERNKRILDTLREISKRAEDEVRKVLKELEKTLKELEDRRPDSEELSAEVKKLLDEVRKALARHKDENDKLLKEIEDSLRRHKEENDRLLEKLKESTR

SEQ ID NO: 12925 - protein, 175 aa, Artificial Sequence; identical to SEQ ID NO: 12924
  Synthetic

SEQ ID NO: 12926 - protein, 175 aa, Artificial Sequence; identical to SEQ ID NO: 12924
  Synthetic

SEQ ID NO: 12927 - protein, 175 aa, Artificial Sequence; identical to SEQ ID NO: 12924
  Synthetic

SEQ ID NO: 12928 - protein, 185 aa, Artificial Sequence
  Synthetic
SEIDEVLTRLRKISKDLNETSDRVNERARKIIDDIKKESKRVNDEAREIVERLKREIDKTRDRDVLRRILKEIEDVARRVKEINEELLARVEKVVREVEEINRELVKRSREAVEAVKRLLDRGVSDEDKVERVVREVEKLHEEDRKRLEESTRSVRKLLEELKRELEKSTRSVKALVDELRERVR

SEQ ID NO: 12929 - protein, 185 aa, Artificial Sequence; identical to SEQ ID NO: 12928
  Synthetic

SEQ ID NO: 12930 - protein, 185 aa, Artificial Sequence; identical to SEQ ID NO: 12928
  Synthetic

SEQ ID NO: 12931 - protein, 185 aa, Artificial Sequence; identical to SEQ ID NO: 12928
  Synthetic

SEQ ID NO: 12932 - protein, 175 aa, Artificial Sequence
  Synthetic
SEAEEIRRRLEEISRRSVEHLRKVLEEIKRISERSKRHLDRVLEENARRLEELAELLKRGGDKEELLADLKAVHDESRKVIEKNAEENDRALKAAKEVIDENRERNKRVLDEVRKGGLPEEVLRELEELLKESEERIKRIEEEIKKIIDKSREDIKRVLEEIERLNAKAADDLRK

SEQ ID NO: 12933 - protein, 175 aa, Artificial Sequence; identical to SEQ ID NO: 12932
  Synthetic

SEQ ID NO: 12934 - protein, 181 aa, Artificial Sequence
  Synthetic
SEVDDVLRRLEELIKTLEDINAKSLEDIKKLIDDLAKILEDALRKHEKLIRELREAKKGIDSREAEEIAKRVLEELKRTSDDLRKKVERVDEDLRRLLRENHERNKKILRDLERLLRDAARRGVPKEALDRMREEIRRLEEESRKSDETIERLIRELRRRVEEVLKTSTDLIRELEEEVKK

SEQ ID NO: 12935 - protein, 181 aa, Artificial Sequence; identical to SEQ ID NO: 12934
  Synthetic

SEQ ID NO: 12936 - protein, 181 aa, Artificial Sequence; identical to SEQ ID NO: 12934
  Synthetic

SEQ ID NO: 12937 - protein, 181 aa, Artificial Sequence; identical to SEQ ID NO: 12934
  Synthetic

SEQ ID NO: 12938 - protein, 178 aa, Artificial Sequence
  Synthetic
SDAEELLKRVADLLKASLESLEKILRDSKELMDRWRKKLEDLLRESEELVDRAEKILRRGGSDKEVLDKIAEEVRRTNDDSRRLDEELHRLSRDTLRKLEENLRRTEKEVREMDKRAAERGVDERVREELKKLLTRVEEEHRKVLETDKKILKEAHKESKEVNDRDRELLERLEESVR

SEQ ID NO: 12939 - protein, 178 aa, Artificial Sequence; identical to SEQ ID NO: 12938
  Synthetic

SEQ ID NO: 12940 - protein, 178 aa, Artificial Sequence
  Synthetic
DAAERAKEKLDKILEDLRDVVRASKENLDRLHAENAETLERSKANLDRLLEKVKKDGVPEELLKELERIIRDLKRKHAKLLEDHRKIIEELKREHDRLLKEAEEIVRRIKDELEKGSDDERDIERILRELEAVLKKLTDESERLNREVERVSRDTKKKSKELNEELKAVLDEVKRKAD

SEQ ID NO: 12941 - protein, 178 aa, Artificial Sequence; identical to SEQ ID NO: 12940
  Synthetic

SEQ ID NO: 12942 - protein, 181 aa, Artificial Sequence
  Synthetic
SEIETVRREIEKILDDLRRTVKRIEDEVRKIHEDLRRSLEDSKRNIEEILKDLERAARRDGLDKKVEDDMRKLVEDLKRKHDKLRADNEAVTKELKDRLKKLEDDLARAIEELRRRLDKGLDKEDIDKLLKELRDLVEKIKKDLKELLERYEEIVRRIKELLKDLNREAEEVVRRLKEELR

SEQ ID NO: 12943 - protein, 181 aa, Artificial Sequence; identical to SEQ ID NO: 12942
  Synthetic

SEQ ID NO: 12944 - protein, 174 aa, Artificial Sequence
  Synthetic
KELEDVIEEVKKLLKTVNEESRRVAEEVRKLIREVSEELTEVIRRVERLVEEVAKGVDSEEALDAVRKRIEELVRRVEEVNAASKRRIEELEDELRKVDEESRETIERLIDLLRRGLDAETVLRSAEDIVAKNRKLAEEVLRRVKKIVEENRKIASEVLDDVRKLVEDVLARAS

SEQ ID NO: 12945 - protein, 174 aa, Artificial Sequence; identical to SEQ ID NO: 12944
  Synthetic

SEQ ID NO: 12946 - protein, 183 aa, Artificial Sequence
  Synthetic
SKLEEVEKAVRKVIEDSRRVNEEVNRRSEEVVRELEKVHREVNDASRRVVEKARRVLKGSGDERLAAEVERIIEEIRELNERDRKRVEEIRKEIEDLNRDLNRRSKESEDRLRKLLEDATRGGVTKEADEVVERAERISEENKRRVEDVARKSKELVEDVRRHSEEVVRRVEELVKEVEERVR

SEQ ID NO: 12947 - protein, 183 aa, Artificial Sequence; identical to SEQ ID NO: 12946
  Synthetic

SEQ ID NO: 12948 - protein, 183 aa, Artificial Sequence; identical to SEQ ID NO: 12946
  Synthetic

SEQ ID NO: 12949 - protein, 183 aa, Artificial Sequence; identical to SEQ ID NO: 12946
  Synthetic

SEQ ID NO: 12950 - protein, 173 aa, Artificial Sequence
  Synthetic
SAEEVKEELKRIATKLKEEIKENIRRLEESVEKIAKELAENIKRLEDILRDVKRGLRDERIVKTVEDIARRVVEDNERIMEEDKDVVRRLVERNEEIVRRVDETVKKIVELIDRGEPGEELVERLRRVVEEVRERLKDSSRELRKINEDSRKAVEDSSAEVAKVVEELERRDT

SEQ ID NO: 12951 - protein, 173 aa, Artificial Sequence; identical to SEQ ID NO: 12950
  Synthetic

SEQ ID NO: 12952 - protein, 175 aa, Artificial Sequence
  Synthetic
SEIERVKKRLEELLAEVEESTRRLEERLKRLLEEAKRSSEEVEKELRRLLEAVRRGLSRDEKLVSELEARVKELLEDSRASLEELKKRVRKLAEDSARLLEEVKREVEKLKAKLDRGGDADDVLARVEELAKRAHDENERLIREVEELVRAHNKRNKELVDEVKRLVEKVIEEER

SEQ ID NO: 12953 - protein, 175 aa, Artificial Sequence; identical to SEQ ID NO: 12952
  Synthetic

SEQ ID NO: 12954 - protein, 175 aa, Artificial Sequence; identical to SEQ ID NO: 12952
  Synthetic

SEQ ID NO: 12955 - protein, 175 aa, Artificial Sequence; identical to SEQ ID NO: 12952
  Synthetic

SEQ ID NO: 12956 - protein, 183 aa, Artificial Sequence
  Synthetic
SDVDRVLEEIRKLLEDLKRHSEKVSEENEDLLRANTELNKRVSEDNERLLEELKRLRERGGISEEDLKRALDRVRKTVETVKEENKRSLEDVRRTVETNKRKLERVVEEIKKLIEDAKRRGSGDEEAKKKLDEVLERAKRTIDRLLETSDRSLEKVEADLRRLNEELDRSLERAERTIRELAK

SEQ ID NO: 12957 - protein, 183 aa, Artificial Sequence; identical to SEQ ID NO: 12956
  Synthetic

SEQ ID NO: 12958 - protein, 183 aa, Artificial Sequence; identical to SEQ ID NO: 12956
  Synthetic

SEQ ID NO: 12959 - protein, 183 aa, Artificial Sequence; identical to SEQ ID NO: 12956
  Synthetic

SEQ ID NO: 12960 - protein, 173 aa, Artificial Sequence
  Synthetic
STEDVLRKIKEDVKRVIDDNRRILDEVRRTSKRVLDDLRANLKHIAEEVERVLRGSDSEEVVRELAKILDEIREEHRRLIRTNEKVLEDIERDHRRISEELKRILDEVDELLRGGKPSKELLEKAKAVVDEIKRLAEESLKRLEDLSRDHKRRAKELNDEIAKVVDELAKRAT

SEQ ID NO: 12961 - protein, 173 aa, Artificial Sequence; identical to SEQ ID NO: 12960
  Synthetic

SEQ ID NO: 12962 - protein, 180 aa, Artificial Sequence
  Synthetic
SAEELLREVAELVKRVDEDLRRLLEEVRASNEEVIRRLEEILKRIEEENRKVVEELRRGGVSEDLVRESKRLVDESRRVIEKLVKESADSVERTRETVDRLREELKRLVEEIAKMVKGGSSEETVKRLLDELRELLERLKRTIEELLKRNRDLLADAEEKARRLLEENRKLLKAARDTAT

SEQ ID NO: 12963 - protein, 180 aa, Artificial Sequence; identical to SEQ ID NO: 12962
  Synthetic

SEQ ID NO: 12964 - protein, 177 aa, Artificial Sequence
  Synthetic
SEDEDLDRVAEKLAREHKKSVEEIKRVLKSADEESKKLVRDTERVIEEIKREVEEARRGNIDEELVERLKKKIEDILRTLEERHKKLIKELREILKRLSDESRRLAEETEKVLEDLERKGVDEEVLKKLAEIVRRVKEENRKVNEEVEKRLRELEEENKKVIEDLKSTVEELVERLR

SEQ ID NO: 12965 - protein, 177 aa, Artificial Sequence; identical to SEQ ID NO: 12964
  Synthetic

SEQ ID NO: 12966 - protein, 177 aa, Artificial Sequence; identical to SEQ ID NO: 12964
  Synthetic

SEQ ID NO: 12967 - protein, 177 aa, Artificial Sequence; identical to SEQ ID NO: 12964
  Synthetic

SEQ ID NO: 12968 - protein, 180 aa, Artificial Sequence
  Synthetic
DEVEDVLRKIEKILDDHRKRIEKNSRDMARIIDEHRRKVEENSREMKKLVDDLKKAVDRGEGDEETAEDVKAKLEKSNRELEKHSEEVKRALDESNEDLRRHSEEVKERIERLVKKLREDGVEREEELKEVADRVKEKLDRLNRENEKSSEELKRELDKINDENRETSERLKREIDETTR

SEQ ID NO: 12969 - protein, 180 aa, Artificial Sequence; identical to SEQ ID NO: 12968
  Synthetic

SEQ ID NO: 12970 - protein, 177 aa, Artificial Sequence
  Synthetic
SKEDRLREELKKLLARLAEEIERLKRALEESNKDLKRTIDASEKHLRDVNEDVKRGGVSEELLRELERSTAENKERAKELLKRHEDLVRKVEKELADLLRRLEEIVARVDEALKRGISEEELDKLLKEARDLIREIEKRLEELLKRVEKLTEDAKRDLERSNREHKELADRIKETAR

SEQ ID NO: 12971 - protein, 177 aa, Artificial Sequence; identical to SEQ ID NO: 12970
  Synthetic

SEQ ID NO: 12972 - protein, 177 aa, Artificial Sequence; identical to SEQ ID NO: 12970
  Synthetic

SEQ ID NO: 12973 - protein, 177 aa, Artificial Sequence; identical to SEQ ID NO: 12970
  Synthetic

SEQ ID NO: 12974 - protein, 185 aa, Artificial Sequence
  Synthetic
SSVEELLERLRRISEENKRRIEKLLREVEKVLRELKDRHRKLLKRVEEIIRKVKEEIKSGLPEEAVKRVLERVRERVKEVLEEADRLNDEMRRIVTEVEKELDKSDKEVEDAVRDILKKIEEGVRDRETAERARETLKRLLDENRDRSKKVKEEIRRILEDLTRTTERVKREIAKLLKELEDTAR

SEQ ID NO: 12975 - protein, 185 aa, Artificial Sequence; identical to SEQ ID NO: 12974
  Synthetic

SEQ ID NO: 12976 - protein, 185 aa, Artificial Sequence; identical to SEQ ID NO: 12974
  Synthetic

SEQ ID NO: 12977 - protein, 185 aa, Artificial Sequence; identical to SEQ ID NO: 12974
  Synthetic

SEQ ID NO: 12978 - protein, 180 aa, Artificial Sequence
  Synthetic
SELEEVLRRIEALVRKAHKENEDVLREIERLVRTAHRLNKKVDDDSAKIAEDLKRGGREDKDKVEEALRRLRELYRRLEEENRRILREIEELVKELEKRNREILKELEDLVADAERKGSDGSEAVRRLKEILERLKEEVRRSLEELRKEVERLKKEVEDSLRELKKSLEEWVKSLEEATR

SEQ ID NO: 12979 - protein, 180 aa, Artificial Sequence; identical to SEQ ID NO: 12978
  Synthetic

SEQ ID NO: 12980 - protein, 180 aa, Artificial Sequence; identical to SEQ ID NO: 12978
  Synthetic

SEQ ID NO: 12981 - protein, 180 aa, Artificial Sequence; identical to SEQ ID NO: 12978
  Synthetic

SEQ ID NO: 12982 - protein, 172 aa, Artificial Sequence
  Synthetic
SKEEELEKLLREHHEKIKRLKEESKRINDRIRRTVEELIKESEKINRDINDTVRKGDRDEEVIRRLLEDVRRKHEELRERLKRELDKVRERHKELLDRARRATEAVKERLDRGGLSEDSVERIARELERNLDDLARVLKESEDDLAEILRRLKEVLEESERDLERVEREVRK

SEQ ID NO: 12983 - protein, 172 aa, Artificial Sequence; identical to SEQ ID NO: 12982
  Synthetic

SEQ ID NO: 12984 - protein, 252 aa, Artificial Sequence
  Synthetic
SEAEEAAERAKRAAKEAVERAKRAVERNEEAARRAAEKAREATERAERAARRAADKARKATDRRALRDAAKELEDAARENADALRKAIEDLARATDEAIKAAREAAKRLKDAAKEALDAARRTARDEDAERILRELKEAIERAARRLDRLLREWEKAAERIKRDAERLLEEWERAAEKIRKELEDIDRKAKDIKDAADKLAEAAKRAVDISKKAADDLKRLAKEDNEIAREAARRLAEAAKEAVKLVDDVTR

SEQ ID NO: 12985 - protein, 252 aa, Artificial Sequence; identical to SEQ ID NO: 12984
  Synthetic

SEQ ID NO: 12986 - protein, 233 aa, Artificial Sequence
  Synthetic
SEKEKAAEDLRRAIEEAKKRSEEAAKELEDALRKAEKEARDSAETLKEAAKRAADAGAPEEALRALEEAIKKAIKASKDALDALREAIKESIDSNREALKALKEAVERAEEGGDREIARRAAERAREAAKRAAEKNKRAARKAEEAAKRAVDEHRKAAKEAREAAERAVRKAEDKDAATEAKKAADTIAKLIEDNAKRALEAAREIAKLIEKSAKEALEAAERIARLIEEAAN

SEQ ID NO: 12987 - protein, 233 aa, Artificial Sequence; identical to SEQ ID NO: 12986
  Synthetic

SEQ ID NO: 12988 - protein, 234 aa, Artificial Sequence
  Synthetic
SVEEAARRAAKALKDAAKKLLEANEKAARAWKELAKELIKADEKALKILEEAARKARRDGPDKEIEKELRKAAREYEEIIKDLREKAKKVLEEYRRIVKKLEEDLKRALDKLREDGVKKDALDAARRAAELLAEAAKKAAKAHEEAARLLAKAAEDSARAAKEAAELLRRALEENKRAEEAAKEAIRIAEEALRRSAEAAERAARIAEDAARKSRKAAEDAAKIAKEAADRARK

SEQ ID NO: 12989 - protein, 234 aa, Artificial Sequence; identical to SEQ ID NO: 12988
  Synthetic

SEQ ID NO: 12990 - protein, 239 aa, Artificial Sequence
  Synthetic
SEEDRLRELAERARRLAKRNRELAKEIIDEIRKLIRDAREAAKKSAEKAKRLIDDARRVAGKPTDRKIVETLARRSAKANEENARLIKRLAEEAIRAAKKAADADRKSAKEVIDALKRIAEDLQAREAADAARRAAKIAKEAADEAIKAWEDAARIAERAARKSIEANKRAIKIAREAAERNAIEEAAKANEEAIKASEEAVDEAARALEEAAEASKRANEKADKALEDAVRAAEEATR

SEQ ID NO: 12991 - protein, 239 aa, Artificial Sequence; identical to SEQ ID NO: 12990
  Synthetic

SEQ ID NO: 12992 - protein, 238 aa, Artificial Sequence
  Synthetic
SEKEDVLRRIREAHERNKRLLERVAEEIKRIVEESRKLLEDVRKKAEDAARRAEEALRKEARDDEKAAEELAKILEDLARLLEEAARRNAKLLRDIAELVKRAAEENAKSNEEIARLLKEAGADDTAAKKVKEAADESLKAAEEAAKKIEEAARKSLEAARRAAEKIKRAAEKAREAAREKAKEALLKAAKEALEALEEALRLIAKATEEAARAAKEALDLILEADRKSAKAAEEALR

SEQ ID NO: 12993 - protein, 238 aa, Artificial Sequence; identical to SEQ ID NO: 12992
  Synthetic

SEQ ID NO: 12994 - protein, 238 aa, Artificial Sequence
  Synthetic
SEREEVAKRATDAHEENERLLREVEKRIKEALERNEELLKRVSDKAREAAKKLEDALRRRARDDERAAEELVKALEDLARLIEEAAKRNAESLREIAKLVRRAAEENAKSNKDLAKLLKDAGADDDAARKVKEAAEESLKAAEEAVKKIEDAARKSLKAAKEAAEKIRKAAEEARRAAEERAKEALRRAAKKALDAAEEALELIRKASKEAADAAREALKLILEADKKSLEAAREALR

SEQ ID NO: 12995 - protein, 238 aa, Artificial Sequence; identical to SEQ ID NO: 12994
  Synthetic

SEQ ID NO: 12996 - protein, 244 aa, Artificial Sequence
  Synthetic
SEREEIEEIKKRVDRTLEEYERKVEDIRRKLTELKDESDKKVKDVRRKLKETEDRVREEGSSEVIERIIEDVKKILEDLVRVHRESLDTAVRIAEELVRVARESIKRVKEILRELAEASKTKDEEKLREILERVKEKLKKIIDDNREVLKRVEEKVKEIIKRNKDVNDRVREELKRLAEELERANVEELRELIERLVRIAEEVSEEDERVLRSLEDILRKVVEENERLLERLKRILEELIRRTR

SEQ ID NO: 12997 - protein, 244 aa, Artificial Sequence; identical to SEQ ID NO: 12996
  Synthetic

SEQ ID NO: 12998 - protein, 245 aa, Artificial Sequence
  Synthetic
SEDEELKKELEKLLKELEEKLEKYRDDLRKDKERLKEKLDRYRERLRELMEELKDLLDKRVRAKELLDRIREIIKESADANRELLEEIRKTLEKSKRMNEELLKKIKEIIERIEERLRKRGVPEEVLRTLAEKARRLLEELKKESERIVREAEEILKRIEEELREVHKELEEILRRIKRKLDEETSEDVLRDIVRRVVEVLRKNLKIVEEIIRKIEELLEKNLRLVEEILRRIARLLEEVLEKTR

SEQ ID NO: 12999 - protein, 245 aa, Artificial Sequence; identical to SEQ ID NO: 12998
  Synthetic

SEQ ID NO: 13000 - protein, 242 aa, Artificial Sequence
  Synthetic
SDAEVIEELVRLHRKLLEDILKLLKELVDIHRETLRRIEEIVERIVRLIEALLDKIRKEGKVDEAADEVDRRLKRLAEEIERLVRETERIIREVLKELERTLRETEKRIEDVKKELEERGTDEKLRRLLEMLRKLHEEVAEVVRRVVKLLLDNHKEVIDRVREVLEKLRTVLKELVDVASDSRKEALERLLERLKEIVDRIKEELDRLLKRSEDSIREIEERVKRLLEESKRVVDEIRERLK

SEQ ID NO: 13001 - protein, 242 aa, Artificial Sequence; identical to SEQ ID NO: 13000
  Synthetic

SEQ ID NO: 13002 - protein, 236 aa, Artificial Sequence
  Synthetic
SKEKKILDRLRELLKESRDLNRRVKETLKKLLEDSKRLLDEIRKRLKELLDELEKENKVPEELIRTVREALERLLRRLERHTDELRKALEDLLRRLEEHNDELEDALREILDVKRRRDEDERELRRKIEELKRRSDKLRRELKEEIKRLRDRSRKVKEEIERELKKLKEEIDRVLRETRNDEAVKRLKEVLDEVAELVKTLLEVNRKILEDVDKLIEEVLKLNDDILREVVKLAED

SEQ ID NO: 13003 - protein, 236 aa, Artificial Sequence; identical to SEQ ID NO: 13002
  Synthetic

SEQ ID NO: 13004 - protein, 243 aa, Artificial Sequence
  Synthetic
SEKEKLLEDIADIARKILKLLKEHLDKLRKLLEEIRRLLEEHSRVLRELIERILDALRRKKKLPEEELKRVAERLKELLDRSERRLREITERLKRLLEESERSLEEIKRRIEKLLDDLRKLSKRVDEDELLERLLEVLKRVVDLVREHNELNERILEEVLKLVEELLRFNEEVLKEIADLVRRVVGQDKDLERELKRVKEISRKLEEELKELKERVKRDSEKMNEDLDRLLEDAERRIRKTRE

SEQ ID NO: 13005 - protein, 243 aa, Artificial Sequence; identical to SEQ ID NO: 13004
  Synthetic

SEQ ID NO: 13006 - protein, 237 aa, Artificial Sequence
  Synthetic
SEEDKVLEELKRLLEELLRKHEEVLKEIKELLDKIIKKHEESLRRIKKLAEEIKERAKKPTSDEVLEEIERRLRREEEENEKILRELRREIEEARRRSEEILRRLRDKLRRLEERVRDDELLRRAAEIVDRVLKVHDKVIDDLKKILETILKIHKEVVERLSDIIRELLELIKEGRDGKTLTEELKRIEDKLEELIRRSKDELDKIVREAEKIIEESKRRLEKLLRELERIIEDAKR

SEQ ID NO: 13007 - protein, 237 aa, Artificial Sequence; identical to SEQ ID NO: 13006
  Synthetic

SEQ ID NO: 13008 - protein, 243 aa, Artificial Sequence
  Synthetic
SELEELVKRIEKTLRDLRRKNEELRKEVEEVEREDRERLERAAEDLERVEKKVEDEVRRRRDKSVVDKIIKDLRELLKKLLDIHADLSRKNLELLERLLRISKESVRELERLLRELLEEIRKAGRISEEELKRLKEEIETLSKRIEDIHRRLETELERLRKENREILERLKEELRRLDEEESRRRPIEKTIEDARRLLEKILKLHRENSEESRRLIEDINRVNRELIDEVAELAKKILRRVEE

SEQ ID NO: 13009 - protein, 243 aa, Artificial Sequence; identical to SEQ ID NO: 13008
  Synthetic

SEQ ID NO: 13010 - protein, 239 aa, Artificial Sequence
  Synthetic
RDEELLERVERLLRELLDTNRRKLEEVEKELRRLLETNKKTLDDVRRLLKELLDVLETREVKDEKRLRDIRRRLEEVVRRLDKLHRDIAEDLKRVKERLDRLHERIKRRLEEVVKELRDLKDRGVDERKVLERAAEVLRELLELLRESLEEIERIIRRLLELHKRSTEEAARALEELLRALEESDDLRELKKRIEDLLKEDKERLEKIARDIERDLERYRRDLKRLEDELREDIERARR

SEQ ID NO: 13011 - protein, 239 aa, Artificial Sequence; identical to SEQ ID NO: 13010
  Synthetic

SEQ ID NO: 13012 - protein, 244 aa, Artificial Sequence
  Synthetic
REEEVLRRLREIIKRLLDKNRKVNEDLVRLIKRVLDKNREVLKRLRDLIRELLEVVRNKRDDKDVEETVRRLERELEKLERTSEELVKKVKKELKDLLKDSRDVLEEVRKTLDTIVKETQEDEIVKKAKDIAKKLSDAHKKVLDDVRRILEKLVKLHRETLKKIRELLEELVRVVKAVRREKRPDEDLERALKKVKDELERIVRENEDADRKIKEEVDRLSEENEKVNREIKKELDDVVEETKK

SEQ ID NO: 13013 - protein, 244 aa, Artificial Sequence; identical to SEQ ID NO: 13012
  Synthetic

SEQ ID NO: 13014 - protein, 238 aa, Artificial Sequence
  Synthetic
EEDERLTKRVEEIKRENRELLRRLEEEVKELERKSEKIVRDLKEKVDRAKEKLDSNKESTELLVEELEKLIREILKLSEDHNRTLEEVVRKIEDVLRRNLERLKELVDEILKALKERKKRDVEELKRKVEKVARDYERLLRKLREVVKRILDESKRLDEELEERLKEVLKKLEELIKEGRPDKDVLTELKRILDELLKLVEKLIRRNLRLLEELLRLVREILRTSNEILEEILKDARR

SEQ ID NO: 13015 - protein, 238 aa, Artificial Sequence; identical to SEQ ID NO: 13014
  Synthetic

SEQ ID NO: 13016 - protein, 245 aa, Artificial Sequence
  Synthetic
SELDTLVELIKRILEEITRVNKELVDEVRKLLEEIVRINERSVRTIEKILRDIAELIRRGREDDRVKEDVKRRIEELKREHEEVEKKIREAIRRLEEESKRLEEDVRRMIKRLREEVERRRADEKVRRLLEELRRLLEELLELHKRLLELIREILERVLEVDKRSLDRLTEILERVLRMSDAGRPEEELEKELRRLKKELEEVVRKSREDLERLKKELEKIVKESEDELKKVEEKVKKLADDARR

SEQ ID NO: 13017 - protein, 245 aa, Artificial Sequence; identical to SEQ ID NO: 13016
  Synthetic

SEQ ID NO: 13018 - protein, 245 aa, Artificial Sequence
  Synthetic
TEEEVLRKVEKLIKDLLDVLRDLLRASEEVVREALRVLEELIEENKRVIEELSRALSDERRESVERMLRKNEERLKKILEDADRVLDKWRRLLEELSKKAKRVLDEVRKRLEEIKREVPETEKLRTLLTILEEILRRLEKIIRDILRINERLLEKLKRILERLRETNREIDERIRKLVEERRGAEERKLRRDLTETKKELEKRHEDLRRELEKLLRDYKRELEEIERRLEEIEKTLKRRADETRR

SEQ ID NO: 13019 - protein, 245 aa, Artificial Sequence; identical to SEQ ID NO: 13018
  Synthetic

SEQ ID NO: 13020 - protein, 238 aa, Artificial Sequence
  Synthetic
SDLERLEKEIRDLLDELRRLTEELEKRSRDILKRLKEILEELKRRIERLLDELRRRRGDTEVLKEVARVLETVLKLLEDVVRELEKLNKELLEANRRLLEEVERIVREVLRVLKEGRDKEELRRVLEKLREDIREVDERIKKINREYRKRVEEIREKLREAIRRAEELIRRIVEKIGSEDDSVRELIEVLKKALEDVRRVLRAIEEIVRRSVELNEKHSRELRRVLKELLELVAKAAE

SEQ ID NO: 13021 - protein, 238 aa, Artificial Sequence; identical to SEQ ID NO: 13020
  Synthetic

SEQ ID NO: 13022 - protein, 231 aa, Artificial Sequence
  Synthetic
SEEEELRKLAKKIEEVIKTSRDKLDKSRKELEKVIRDIERRLRELRRELEELVRRGLDEESLREILKRLIREVEEIARTLEELADDSLRKNKENIDEIKRLVEEILKKLEDNNVSEEVLEDVKRRIEELEKEAEEIHRRYKTELDKIKKKIRDILEELKKEVKRIDDEIKAGRDREDVLREIEKLLEEILRALRKLLKDLLDLHDEVLKADEKLLKRLREIVKKVLEEVRK

SEQ ID NO: 13023 - protein, 231 aa, Artificial Sequence; identical to SEQ ID NO: 13022
  Synthetic

SEQ ID NO: 13024 - protein, 231 aa, Artificial Sequence
  Synthetic
SEEEKLRELRKRLEDTVRRSKEELEKSTEELKDVIKKSEEKLEELKRRLEEMKRRGISEEAIKEIIRRLLESNRRNLEELRKLLEESLRKNRENLEKIMRLLDEVIRTLEENRVREEVLKEIRDRLREIKERAKEIHKEYKEELERIKERADRIHKEVKEKIEEVERRIEAGTDSEKLLTDAARILDDVVRVDRELLRLVLELHKRLVRADEKLLTDIRELARRVLEETRK

SEQ ID NO: 13025 - protein, 231 aa, Artificial Sequence; identical to SEQ ID NO: 13024
  Synthetic

SEQ ID NO: 13026 - protein, 236 aa, Artificial Sequence
  Synthetic
DEDERLRELRDRVRRSEEEDERRNKRHEERVKELEDEDKERNERHRKRLKEITDRLKERNTDDRVREILDELKRVAEEVNEVNERATKELSDLLKTLNDVNREASKLNVEAIERLLKLVKDGSPREEIEKRYRDIVKEIEERYEELLRRAKKILEDIKRKYDRLLERLEKIIDELRKNDIREDLLKVVRDSLEILKELIRTVLKAIEESLRILEELIERLKRHIETILRLAAETTT

SEQ ID NO: 13027 - protein, 236 aa, Artificial Sequence; identical to SEQ ID NO: 13026
  Synthetic

SEQ ID NO: 13028 - protein, 237 aa, Artificial Sequence
  Synthetic
DEEELEKEIKKLLEEATKKHEDVKREIKERLEKLRRDHEEAEKRVRDELRRLEEELERRNSDERTREAVELLKEIVKEILELVKRHVEKNAEIVERAIRLLEKHHKENKEIIREIIELLKRVTDRDRIREELKRLLDESEDSVRRILEEVEKLIRESEESVERIRRRLEELLKRLKDRAPDAEDLIRVLKKLIEDLERLLTKNRRLLEEIVKILTKLLKDNRDLLRRILRKVEETAK

SEQ ID NO: 13029 - protein, 237 aa, Artificial Sequence; identical to SEQ ID NO: 13028
  Synthetic

SEQ ID NO: 13030 - protein, 239 aa, Artificial Sequence
  Synthetic
DEARRIKEIVDRAVEIWRRLVEEIKRIVKEVLDKWRKLIRELIELVRKALEDLRRTNGAKEDVLRKIEEEAKKIIRDVEDLLKKIADKYKRIIEELEELLRRLTEKYKEIKKELDKGVDKKDVVKRLEELNREVLETVRKVLEDLARLDEDVLRTIAEILKRIAELIKRVLEAVIRDKGKTDELKRLEDDVRKKLKDLEDKLRKLRKELEETHRRLAETIRRIAEELERLHRELKRESK

SEQ ID NO: 13031 - protein, 239 aa, Artificial Sequence; identical to SEQ ID NO: 13030
  Synthetic

SEQ ID NO: 13032 - protein, 239 aa, Artificial Sequence
  Synthetic
SKDERLRKVLEDVERLLREVLKKHRKVIDDLRELLKRVVEIHRRVLEEILKRLEEEGIDETVLKRLDDAIKESEDSIRRVEELLEDVLRRSEEKAKRAEEDIRRVIEKLDRLARAGVPIEELVKELERLIDKLLRILREINRELKELLDRVIEILRRNNERLVRLAEDVLRRLRETGRVSDEVVERIRRTLEEIERRLRKTDKDLEKDLRELKKDLDRTDEELKRKVEKLKRELKETSK

SEQ ID NO: 13033 - protein, 239 aa, Artificial Sequence; identical to SEQ ID NO: 13032
  Synthetic

SEQ ID NO: 13034 - protein, 236 aa, Artificial Sequence
  Synthetic
DEKDRLEEEVRKLLKEAEDELRRLKRENEKLNRELKETLKRVKEESERLLRKLREDVRKDGTREESIKEVADRSIKLLKELLRILEEVIERSERSLEEVIKMLEDLIRRLEEILRRAGLREESLTKLKKKLEDVLKELRDMAKRYRDELRKIKRELEEAEKRYRKKVDELRRELEKGKPLEEVLEELDRLNKEVLKAIEEAAKKLEDLNRRVLEVLEDILRKLKEIVDEALKVLRK

SEQ ID NO: 13035 - protein, 236 aa, Artificial Sequence; identical to SEQ ID NO: 13034
  Synthetic

SEQ ID NO: 13036 - protein, 240 aa, Artificial Sequence
  Synthetic
KEEELLERLREVLKTDLDLLRDLVRTLKEDLDKDARLLEELVERLKKLLDKIKRLLEEEGAVSKDDLKRIEDRLREIKKELEKLLKEYKERLDKIKKELDKLLREYEEALRKLTKEARDLMREGNLREEVLKRISDRNERLIEEMAKKLRDVLRDNKRLVREIVEKLRTVLEDILRLVEEIDIDERVKREIRKDLDKIRREIEKIVKESEESNERSLEKIDRILEESKRRNERLKRELDR

SEQ ID NO: 13037 - protein, 240 aa, Artificial Sequence; identical to SEQ ID NO: 13036
  Synthetic

SEQ ID NO: 13038 - protein, 234 aa, Artificial Sequence
  Synthetic
SKKETIRKLIEENKDIIRKLAEKLKRLLEESERIAEEALRLIKELLERIERALRRVAKDIDEELLKELEKELRRLEEELKEILDRVRDLHRRLKEEIRKILEESKKLNEELEDRLRKDEDVEKLLELLERVHATDVRLLRELLKLLKKVHEDVVRLLERLLELLKRVLDRIVEELDLRDKELEKLLEDLEREIRRLKKRLKELSDRLEEKIRKIKRELDDLSRRLREKIERTRK

SEQ ID NO: 13039 - protein, 234 aa, Artificial Sequence; identical to SEQ ID NO: 13038
  Synthetic

SEQ ID NO: 13040 - protein, 240 aa, Artificial Sequence
  Synthetic
DDEKRLKDRLREALKRNEELLDRLRRRVEEILDRNRKLLERVRRELERVLKELEDLIRRGAPLEDILRRLREVIKELLELARRILEHNLRLNEELLERVERILKHNLDVVKELLDLVKERKGDTEELKKLLKRLKDLHDEVRKRLEEIERELRKLHRDVREELKKIDRRLEDRLRKVEEENSEDETVLRELVEELERVVRRILELLKRLSDASKRVVEEILELLRRLSEKTAKAVDDTRT

SEQ ID NO: 13041 - protein, 240 aa, Artificial Sequence; identical to SEQ ID NO: 13040
  Synthetic

SEQ ID NO: 13042 - protein, 235 aa, Artificial Sequence
  Synthetic
DDERRLETLIRLSRELIERVRKLLRDIIRTSKELIEEVLETVKRILDKIEELAKEVNLPREVLEEIKDELERILKELEDAVRDIERKYERLLTELEKMVREIEKKYKDLLEELEKGLDTKTILEEIKRLHDEVVEAIRRALKALEEIHREVHELIKRILDKLLEVLKKVVKVLEESGLRDEKISRKVEELEKEIRRLIEELKKKNEEVEKKIREIMKELDERSERLRRELDRTRD

SEQ ID NO: 13043 - protein, 235 aa, Artificial Sequence; identical to SEQ ID NO: 13042
  Synthetic

SEQ ID NO: 13044 - protein, 242 aa, Artificial Sequence
  Synthetic
SKEDELRKELEEVVKRIEDALRKLKERSKRVAKRVKKLLDDLKKESEEVVESLREKLEKERVPERIVRTLEELIKTNRDTIDELEKVAKKLIKLHEDTLREIERLLRELIRLLREALEANVEDERFLRELEKRLKEVLDELERLLRESEDRLERVIKEIEDKLRESRRKLEEDIERVEREGTTESVRKLLEELRRLHERIIKIIEEILELLRRVHKEVAKDVRRLARELEELVRRLVETLRR

SEQ ID NO: 13045 - protein, 242 aa, Artificial Sequence; identical to SEQ ID NO: 13044
  Synthetic

SEQ ID NO: 13046 - protein, 240 aa, Artificial Sequence
  Synthetic
SAEEILDTVAELIKTHLKIVREVLKTVRDLNRRSLDLIRRILERMRRLVERLVRLIRNNGRERELRELLKEIEEDARRLMEELRRLHKEVEDTIRKLIEELRRLNERIKREIERLIKDLRDERVIEVLRRLLDKLRRHAEEVEKALRDNLRLNRELIKRLEEIIKETLKRLEELVREVERDGPVEKRLREVEEEVERRLDTVRRELEEVEKESDRLLEELEKKSEDFERDIRRLLKEAKT

SEQ ID NO: 13047 - protein, 240 aa, Artificial Sequence; identical to SEQ ID NO: 13046
  Synthetic

SEQ ID NO: 13048 - protein, 237 aa, Artificial Sequence
  Synthetic
SKREEIEKLLEDLKRDNKRVLDRLREVIKDNEDKNEKAVRDARELLERLKRELEEGNLDERLRDVVRRLLTELEEILKELEETLKRNNDEVRKLVDELRKTSRENLEKLRELVEKVREGTSDKTIRDAKRESEKKLEDIKKRIKEVEDKSRKTVEDIRRRIKEVDDKLRRTLEEVRRRDGDTEALKRLEEVAKELLKLIEEVLKENERSNREILRLIAELVKRNARVNEELLEIARR

SEQ ID NO: 13049 - protein, 237 aa, Artificial Sequence; identical to SEQ ID NO: 13048
  Synthetic

SEQ ID NO: 13050 - protein, 237 aa, Artificial Sequence
  Synthetic
EKDDRIREKVKEIERRNDKALDDIRRRVEEIKRENDEVLDRIRKELEDLKKEVEEVAKRTGRVDVLEDAKRALEELLRLIEEILRRSKEVLKRLLELIERALRESKRVLRELIKVIERRRDDKDLEDILRRHEEIVRKIVRELEKILKEHRDIVKKVVEELRKILEDLERRIREKGVDEELKKLLDKLLEDLRRIVKKLEELLKKNDDELRKIVKEVKDLLKRNHDELERIVREARR

SEQ ID NO: 13051 - protein, 237 aa, Artificial Sequence; identical to SEQ ID NO: 13050
  Synthetic

SEQ ID NO: 13052 - protein, 237 aa, Artificial Sequence
  Synthetic
SKEEKIERDVDEIRKENEEVLRRIRKKVRDIERENDEILRKIEEDLRRIEKDLERVAKERGRRDVLERLRELARELLELIRKVLEDSKKMLRDVIKLIEEILRLSIRVLDELLEVIRRKEDEDRLRKILEDHEREIRRVARELDRLLREHREIVKEAARRMEELLERIKKDIDERGVDEDLRELLRKVLESLRRIVERVDRTLKDNDRKIEEIVRELKELLKKNNDALRKIVEDAKR

SEQ ID NO: 13053 - protein, 237 aa, Artificial Sequence; identical to SEQ ID NO: 13052
  Synthetic

SEQ ID NO: 13054 - protein, 237 aa, Artificial Sequence
  Synthetic
SREEVFELLLDVLRKIVELIKDLAKKNIDVLKKLMELIDELVKINEKSLEDLLRLIREGRDERDIDRLIRENKKKNEEIVERLRRLLKELEERNRKILKEIEELIRELEKELRKKVRGEEVERLLEEIRRVLKELLEKLERESREVLRKAEEILRALERLSERVLKILRDLLDLRRRNERDEKELEDEARRLKKEYRDEVERLKKEIREIIERYKDALRKLEREIEDITRRLKERAD

SEQ ID NO: 13055 - protein, 237 aa, Artificial Sequence; identical to SEQ ID NO: 13054
  Synthetic

SEQ ID NO: 13056 - protein, 238 aa, Artificial Sequence
  Synthetic
SKLEDLLRRAEELLKDIVRANERLLEEIRKLLKEIVKANEDLLRKVKRLLEEAVEMAIRERGDKGEELDKIKEDLKRVIEKSRRDARRIEEKLKEVIRESRERLKALREELKRVEEMVRRGELDEDTVLRELEKIIRKLLRVHEDSLEKLIRLIEELNEVDKESLRTLVKLIERLERDIKLREEIVTRVRKKVEELKEEVKRINDEVRKKVRDLEETSKRILERVEDLVRELKERARR

SEQ ID NO: 13057 - protein, 238 aa, Artificial Sequence; identical to SEQ ID NO: 13056
  Synthetic

SEQ ID NO: 13058 - protein, 238 aa, Artificial Sequence
  Synthetic
SKEDKARELEKRLRDNLKKLEEVVRELAEVLKRNLEKLRRLAEELLRALKRLLDKLRAGGLPKDELEDLRREVEDVLRRLKDLLRKLKKANDESLTRLEELLRRAEEENRRVLTTLRELLRNNGDDRDLARLVARLVEANNRALEELLRLVAKNVEDNNRVLEELLRLVKELAKRLLARIRDEDLVRDIRRELKELEERARKILRDDERDLRALEKRIRDIIREDREELERLKERARK

SEQ ID NO: 13059 - protein, 238 aa, Artificial Sequence; identical to SEQ ID NO: 13058
  Synthetic

SEQ ID NO: 13060 - protein, 243 aa, Artificial Sequence
  Synthetic
KREDILKKLEDIIRDIIDKLRRILEKVKRLNEDIIREIKRLLDESLKTLEDLLKRIADKSRDRELEDILRRVLEKLRRSLDKLRDTLRKLKEETDTVLERAERTLKELKDRLEKLLRDAEKVSEEDLVEMLKRLIDELRKVLEDVIRVSKELVERLLRALREHLETNKRLVKELLDALRKTTGDDEEIKRLKEELERRHRRLEEEVERVARELEKRHRDLERDIRRVAEELKKLLKKLRDDRR

SEQ ID NO: 13061 - protein, 243 aa, Artificial Sequence; identical to SEQ ID NO: 13060
  Synthetic

SEQ ID NO: 13062 - protein, 228 aa, Artificial Sequence
  Synthetic
REKEELSEEIRRRLDELRKLLEEYEEEVKRLLTRLRDKLRRYKEEVERLLRKLKEDNKVDEEVLKLLEDLLKTNLDILEEILRLLEEIIRRNLDILRRLLKLLEELIKEVEKRGGGTEEVKRRAEDVKRKIEELDRRSDEEIKRLEKRIRELNTDSKRRAEEVLRRIEKKGVPKEAVDLVRDVLRRVEKVNRELLELIKEVADRVRERNKELVELIDRLLERLKRADK

SEQ ID NO: 13063 - protein, 228 aa, Artificial Sequence; identical to SEQ ID NO: 13062
  Synthetic

SEQ ID NO: 13064 - protein, 236 aa, Artificial Sequence
  Synthetic
SEEETVERLLEEARKRHEEIIKKAKELLDRAREEHERIIREAEKLLEEIKKRVDELVRDGQPAEEVLRDLERVVEEILEVLRRLLDANRRVVDDVLRVLEELLRVNEEVNRRIIETIRLPEEVVEELKEENKRLRDRLDKLVKDLKKTNKEIEDKLRKLAEELKEELERIADRIRKTGTDRKTLLREIEKLLKTLEDILRDLLRLVEKTLKELEEILKDLVDKARENLKRLRERIR

SEQ ID NO: 13065 - protein, 236 aa, Artificial Sequence; identical to SEQ ID NO: 13064
  Synthetic

SEQ ID NO: 13066 - protein, 234 aa, Artificial Sequence
  Synthetic
SKEEEIVKEVEKIVEKLLEVNRRALERIEEIVRKNLKVNRELVEEIERIVEELIRTGDVDERVKRELRRRLEKVKEDSERVLKKLEEDLRRVKRRSEDTLRRLREELKRLKEELRDGDRSGDELEEALKKILKKSEEHVRELEEIVRRLLEKSREHLEELVRIAKRLLDEARKRKNVPEEMLRRVLKKIEEVIRRAREEHEKSTRELEEVIKELKKRHEDVTREAKKVIDDLKR

SEQ ID NO: 13067 - protein, 234 aa, Artificial Sequence; identical to SEQ ID NO: 13066
  Synthetic

SEQ ID NO: 13068 - protein, 239 aa, Artificial Sequence
  Synthetic
SEKEELKRLLDKLLKELKRLSDELKKTIDKILKILKEVSEEVKRTADELLDAIRRGGVDEEVLREIKREIEEIEKKLRKVNKEIEDEIREIKKKLDEVDDKITKEVEKIKKKLDDDRVDRKEVIKALKEILKEHADVFEDVLRRLKEIIKRHRDVVKEVLEELRKILEKVAEVLKRQGRREDELRKVEEDLKRLEDKLKKLLEDYEKKVRELEETLDDLLRKYEETLRRLEKELEEEER

SEQ ID NO: 13069 - protein, 239 aa, Artificial Sequence; identical to SEQ ID NO: 13068
  Synthetic

SEQ ID NO: 13070 - protein, 234 aa, Artificial Sequence
  Synthetic
SRVERLEKLLEEHKRLVEDLIRLLDELAKKHDEDVRRLIERLKELAERLKRLLERSGVEEELLKRVDEAIKRIEDKLRRLEEHIKRVIDDIRRRLEELREHSDRLIEEIRDRLRKRDDEEVLRTIIELLRRNMERVLRLIEEILKLLEENLEVVKRLLEDVLRILKRIAEEIESRLTDKRDVDRIREEIKKLIEDVRREIKRVEDKHKKDIDRVKEKLDRVRDRHEKMAEDSKR

SEQ ID NO: 13071 - protein, 234 aa, Artificial Sequence; identical to SEQ ID NO: 13070
  Synthetic

SEQ ID NO: 13072 - protein, 241 aa, Artificial Sequence
  Synthetic
REKEELLRLLKEIAERILDILRKALELLDRVVELDNRTSKELLELSAELVKRILEAVRDGKPEEEIRKTLERVKKESRKIVEKNKRLNEEVLKELEKLVDELRKLLEDIKRKLDELNVPDEVRKVLEDLARLLKEVIDLLRRLLEENSRVSEEIVKLNEEALKTLEELVKRLVDLERKGTSEEEKKRLLDDLRRILREYEERVKKLNDEHKKLEKEIKDKVKRILDEIRRTLDKILKELRK

SEQ ID NO: 13073 - protein, 241 aa, Artificial Sequence; identical to SEQ ID NO: 13072
  Synthetic

SEQ ID NO: 13074 - protein, 244 aa, Artificial Sequence
  Synthetic
KDEERLVKKIRDSLRKYEDLLRKLVERIRDLLRRYEEELRKLLTEIEKTLEDVRDVLRRKNVDERAKEVAKRLVEAVKRLIEIVKRILEKTKRVVKKLEDLLRRAAELNRDVVEKILEIIKRKGPEDDFRRIVRRLEELHREVEDAVRKLVEDLKRLHREVVEELADIIRKLDKLLKEVERDIDLGDLLEMLRRLVERLKRLIERVLKLNRELVKKLLELLEEALRRNRRLVEDILKIADEARK

SEQ ID NO: 13075 - protein, 244 aa, Artificial Sequence; identical to SEQ ID NO: 13074
  Synthetic

SEQ ID NO: 13076 - protein, 236 aa, Artificial Sequence
  Synthetic
SDEDRKRKKLEDVERRLEKLLREYEEKVRRVLEELRRLLEENKRHVEELEKRLRDRAKKPNDDEVLERAVREVRKHLKDNVETDRKLLEDLKRALEESVRLVEEVLKILKELIDELKSKVPGEEAEKLEDDLRRVVETVRRLLEESKRKLEKVIREVEELNRELKELVDRVADEIRRKRLLEEALERLRRLLEELLRINERIIELIRELLEDNRRILEEILKLIKDLLRRAERIVD

SEQ ID NO: 13077 - protein, 236 aa, Artificial Sequence; identical to SEQ ID NO: 13076
  Synthetic

SEQ ID NO: 13078 - protein, 242 aa, Artificial Sequence
  Synthetic
SEEEDLEREKRRLDKYSEDDRRRAEKVLRELEEEVKKSRKRLEDAKRRLDEEVRRNEKLEEEVLRLLKELVKKVTEIHERSLDLLRRAAEKVIRINERSHRELKRIVEEVIRIKRRNGSEEELDKLIRDLRKSLDDVRKTSEKLVKDILEELKRILDESKTLADKLRRDLEKIVEDIDRRNLPEEVLRILKTLVKELEDILRELLKINEDLVRRLERILRELLKSNDNLVKELEKLLEKARR

SEQ ID NO: 13079 - protein, 242 aa, Artificial Sequence; identical to SEQ ID NO: 13078
  Synthetic

SEQ ID NO: 13080 - protein, 246 aa, Artificial Sequence
  Synthetic
EKKERIREALERAVRTLEKLLEDDKRELDKARREVRELLRRDKEELDKVVERVERELDRARERLDEDIERMVREVLELLKKHLDEVRRAVDTVLRLLKTHLDIIREIIKRLIDKIRDLLRLVARDGTREKDLKKVEDEVRELVEKLRRDSEKVEEDLRRTAKRVRDLNEEVRRRLDKKRKDVERKPTPRKLEEILRLLEEALRRNSETLEEILRKLEEILKRNRKTLEDLLKLVKEILDEIRERLR

SEQ ID NO: 13081 - protein, 246 aa, Artificial Sequence; identical to SEQ ID NO: 13080
  Synthetic

SEQ ID NO: 13082 - protein, 247 aa, Artificial Sequence
  Synthetic
SLTERVLDLARDLIRILLEIHKRALKLIAELVKKLLKIHEDVLKLSEELVEELLEIVARRLPREDLLRALKELLEKIEDVVRDIERRHRDLLREAEEVVEKLKREHEEVKERIERAVKKLAEDGVDKDKLKELVDVLEEILRLSKTTLEELVKALRDVIRKSLEALKENLRILRKIIRELEELERVDEDTLRRVLERIREEVERVKEKHRRLLEELKKLLEELRKRSKDLLEDIKRKVRELEEKTRR

SEQ ID NO: 13083 - protein, 247 aa, Artificial Sequence; identical to SEQ ID NO: 13082
  Synthetic

SEQ ID NO: 13084 - protein, 237 aa, Artificial Sequence
  Synthetic
REDEELTKRVEKILRDAERLVRKLHRENREILKTLKRLVEELEKENRKVLKDAEDLVRKERESKEKLLKLAEDLVKRNEEALRELVRLAEELVKRNVRVLEELLKLLTDLLRELKDALRRAGRRREDLDRRIDEARKRIRRELEELRKRHEELLRELKKRVKELADEHRELLDRLRKRDEDARELLKELKRIVKKSLDELRKLLKKLEDIVRESNERLKEVLKKITDLIRKVLEDIR

SEQ ID NO: 13085 - protein, 237 aa, Artificial Sequence; identical to SEQ ID NO: 13084
  Synthetic

SEQ ID NO: 13086 - protein, 235 aa, Artificial Sequence
  Synthetic
SEEDKIAEELKETLKRYRDRLEEIRKELEDKLREYEKRLEDLARELEKKLRKLEARDVNVRELLKVLRDVVRAIEKLLRENLKVVEDVLRAVRRILEENLKVVEEILRRVLKILREVKDEERARREIEKIVRKLEEVDKKIEEDVRELKRRLEEANKKLREDLKELKRELERVLRDRNVDEDVRRVVRELLRKLEDILRESEETNKETLEKIDEILKESERTNREVIRKLKETTD

SEQ ID NO: 13087 - protein, 235 aa, Artificial Sequence; identical to SEQ ID NO: 13086
  Synthetic

SEQ ID NO: 13088 - protein, 244 aa, Artificial Sequence
  Synthetic
SAEETLRRITEESKRVLEEITKKYEDLERESREVLRKLREDLDRIKRELEDVLTKGKDDKDEVLTVLEKVLDELLKLHRENLRVIKELLRKVLEVDRENLEVLKRLLEKARDLLRRSGRDEKDLKKLEDELRKVKEELEKKHEKSKRDIEDLERELDKVTEEVERLLRKLKEELRRAAENSDEDRERLARLLKKLADKLIRVLEEILKINEELNRKIIKFARENLERNRRVNKKVIEVLREAAR

SEQ ID NO: 13089 - protein, 244 aa, Artificial Sequence; identical to SEQ ID NO: 13088
  Synthetic

SEQ ID NO: 13090 - protein, 238 aa, Artificial Sequence
  Synthetic
SEDEKLKKEVDDVLERAKRLLDRLREANEDVLRKAKEDLDRLLKSNREILEELRKIKGLDEIEKIVRELLRENHEVLKRLVKLVKELLDLNLKALKDLMKLVEELIERLKRALRKKVPEEKLRKLDEEVRRIEEKLKKALEESKRIVDEIRRRLKEIEDKSRKIARDIEKELKDTKRAGPLEERVLERLLKALKEHSDELKKVVEELLKLLEEHLREVEKLVRELLADLKRLLDKTRK

SEQ ID NO: 13091 - protein, 238 aa, Artificial Sequence; identical to SEQ ID NO: 13090
  Synthetic

SEQ ID NO: 13092 - protein, 246 aa, Artificial Sequence
  Synthetic
SKIEELLTKLAELLKEVIDELRKNLKRLEETVDENLKTMEDLLRKLEEVVREVLDIATKKNPSEEAKRKIDALRKKVEDLVKRIKDILEKDKRDLEKVVRDSEELLRELERKVREVLEEVKKIVRDVKDKDELVKRILDLLKELLDDVKRVIKEHLRLVREVLERNKRSLDELVKIIRELLKAIKEVGLVDDEVRKRLDERAERLEKEVEEVKKENDERAKRSAEEVKKLLDKLDEALRRLEEEVR

SEQ ID NO: 13093 - protein, 246 aa, Artificial Sequence; identical to SEQ ID NO: 13092
  Synthetic

SEQ ID NO: 13094 - protein, 240 aa, Artificial Sequence
  Synthetic
SEDDELIKKIKKLAEEIIDEIRKLIEKSKEILKRLLDELRKLIEKSKKLLKETLDKLRKDKREAREDLERVETVIKRAAEEHDRLLKEIDDALKRLEEEHEKLLTDVREVLKEVKKELDELKDKNADRTELLDVLRKALEEAKKVLERLLKLNREAIETLERVLRKLLKLHRDVLARIEEDGLDEEALKELEKKTRDLEDEIRKVKDDVKRRHDELKEEIERVLDELRKVLKRLEDEARK

SEQ ID NO: 13095 - protein, 240 aa, Artificial Sequence; identical to SEQ ID NO: 13094
  Synthetic

SEQ ID NO: 13096 - protein, 250 aa, Artificial Sequence
  Synthetic
KTEEILKRVKEILDELAKELRDIIRESLRTIEELLDELRRILEESERTLEELVKTIKDEVKDKEELLRRLKRLLEDLRRKHEELLKRLKEAVDEHRDRLRKILEELERVLKELRKRIEELRRSLDRIREKDVLRKLEEVLRKALEILERLLKKIRESARELLKIIEEVLDRNIKVMEEALKTIKELLKDGPDEVKRRLEEKERRIRTRYEELRRRLRKRVKDYEDKLREIEKKVRRDAERIEEELERAKK

SEQ ID NO: 13097 - protein, 250 aa, Artificial Sequence; identical to SEQ ID NO: 13096
  Synthetic

SEQ ID NO: 13098 - protein, 239 aa, Artificial Sequence
  Synthetic
EELEDVLRRIEEVLREIIRLLEEHHDMVRRAVERIKRLLEDHHKKVEDILREIKRRIDKEDVKRTLDDILRRNNETLKRLKEELDRLLKENEDRLRKVTKDLKRLLDKAKELVDRIDSEEVLRRLAEIVERILRTVRKVLRDSIRILERLLRVAREALERSIKSLREILDTVEKALKDGPEKVKKELKDLARKAEKLSEDVRRELEETVKDLRRKSKEVEDRLDKLTEEIRRTLEEKRR

SEQ ID NO: 13099 - protein, 239 aa, Artificial Sequence; identical to SEQ ID NO: 13098
  Synthetic

SEQ ID NO: 13100 - protein, 231 aa, Artificial Sequence
  Synthetic
KDEERLTKTAKESLDHNKELLDRIRKKSKEVLDHNKELLDRIREEIKRLLEELDRLKRENRPKERIVEILRKILRTLEELLKRLIESLEENLRVLAKLLEDLIRSLRRNVELIAKDLEEDDELKKLEKEYREIERELRERLKTLEKEYRDLIKKLRESLEKLKRELEKLERDGVEVEEVIKEVKKMLERALEELREVNDRDRRANERALRILEALNEEDKRATKRVLERKK

SEQ ID NO: 13101 - protein, 231 aa, Artificial Sequence; identical to SEQ ID NO: 13100
  Synthetic

SEQ ID NO: 13102 - protein, 247 aa, Artificial Sequence
  Synthetic
REKEELLKLIKRVIELLKRVLEEHLRLVEDVIRRLKELLDSNEKIVREVIEDLKRLLDEVRDDKRRLDRIKEKLEEVLERYKRRLEEIKRDLERMLEDYKRELKRIEEDLRRVLEEVERIATRNEKPMEFLIDKLRKILERALRELDKLSKKLDELLKKVLEELEKSNREIDKLLKDVLRRVEEAGAEEDLLRKAKKVITEVREKLKRNLEDVRRVIEDVKRKSRRILEEARRLIEEVERELEKIRK

SEQ ID NO: 13103 - protein, 247 aa, Artificial Sequence; identical to SEQ ID NO: 13102
  Synthetic

SEQ ID NO: 13104 - protein, 243 aa, Artificial Sequence
  Synthetic
SKVERILRLIEELLRLLREALRKIHRINEELIRTLEEVLREIHRINEDLNRKLREATGRNDDLDRADTESEKLNRDLRRRNEEVLKRLRESNKRLKEENDRVDKKIKKLLEDLERIVKDRPEALEELVKILEEIIRDIERLLRKNREVHEENIRLIEELLKENIEAHERDLKLIEDLIRRENLPEELKDRVREELDRSRKKLRKLEEEMRRKLKRSREELKKLEEDLRRELKKLREELERIRR

SEQ ID NO: 13105 - protein, 243 aa, Artificial Sequence; identical to SEQ ID NO: 13104
  Synthetic

SEQ ID NO: 13106 - protein, 236 aa, Artificial Sequence
  Synthetic
SRKERIKRALEEHIRKLKEITDEVRKTNEELLELTRRILEEAKKANEELVKKIREALDKVKELEEEIRKLIEESERIVEELEERSKELLKRSREEVEEWRRRSEELLRRLEKILRDVKDEKELVERAVKILRDDSRIAKEILRRNLRLIEENLERLKEIIERNLDLLRRLLELLKRAGVDEEALKELEEKLDRYRRKLEDLLRKYAKKLEDYKRKVKKLEEENEELLKRIEKEMEK

SEQ ID NO: 13107 - protein, 236 aa, Artificial Sequence; identical to SEQ ID NO: 13106
  Synthetic

SEQ ID NO: 13108 - protein, 226 aa, Artificial Sequence
  Synthetic
SEKEELEKRLRKKLEEIKELVERYKRRLEELLRRHREELKEIEKRLEDLERKIEELDVPERVKKLLRDLIRVLREWLRRSHDLLRRLLEVSKKALEDILRLLEKLLKEIKDLEDEDRLEERIDKVLKDLKRIDDRVREMVKEVLERDDRLARDVKKKVEEVLRELEEAGVSEEVKKIIEELLRLAEEVLRRNKRLIEALLELHEDEFRKVEEIIKELSEEAKRASK

SEQ ID NO: 13109 - protein, 226 aa, Artificial Sequence; identical to SEQ ID NO: 13108
  Synthetic

SEQ ID NO: 13110 - protein, 238 aa, Artificial Sequence
  Synthetic
REKEKIREALETNLRLLEELIKRLKEILDTHNELLRRVIETLERLLKELLELLEEAGLEEEVLREVKRLVDELRKEARRVLDEHEKLVRKIKKEAEDVKRESEEIIKEVEDKLEKLDREELLERVRRVLKKSDDLIAELVRRALKILEELTRLLAELLKKVVEILRRIVELVERVLTKKGAPKEDLERLRRKVEELEDRLRRLLEKLKRDSDELMRELERILDRYRRESEELDRRLAE

SEQ ID NO: 13111 - protein, 238 aa, Artificial Sequence; identical to SEQ ID NO: 13110
  Synthetic

SEQ ID NO: 13112 - protein, 232 aa, Artificial Sequence
  Synthetic
SELERLRKILDDLRKKVERVAEEHKRANDKLAEEIRRVLKTHREMNERAIEEVKRTVGDDERIREVLKKVLKESEELLREVEELLRRILERSKDLLRELKEILDRVLREVEELLKRNTDSREALKLLEKLLRMLLEVSKRDNRLLEELLKLLRDISKRDHEVLKKLLDEIRRTNTDLREVDKRLRELLEEHKKLVDDLDKRARKVHKEHKDKVDKLREELEKTLRDIKRETD

SEQ ID NO: 13113 - protein, 232 aa, Artificial Sequence; identical to SEQ ID NO: 13112
  Synthetic

SEQ ID NO: 13114 - protein, 246 aa, Artificial Sequence
  Synthetic
DSDEIVKTLLEKLRRILKEVEEIARENHKRDRDANREINKLVEDIARRLEEVAERLREVIDERVLKKLKELLDRLREDLKRVDTENEELARRDEKRLEDVIKKIEELLRDLEKKLEEVKRRGEPREDLLRKALEVLKRIVELIDKLIKDHEKSLRDSVELNLRLLRRILEVVERVVELLERVLQGLDEKDLRRLRKDIERLKEEVKRALDELRKKYKKIEDDNRRLVERIRRELKKILDELDEKRQ

SEQ ID NO: 13115 - protein, 246 aa, Artificial Sequence; identical to SEQ ID NO: 13114
  Synthetic

SEQ ID NO: 13116 - protein, 241 aa, Artificial Sequence
  Synthetic
SEIEKVLEINRRVLKELERIVKKVLDIDKEAAELLRDIIRRVLEIIKKVIDDIIRTRGEQEDVRRVEDELRRTIKKLKELLDEYEEETRKLEEDLRRELEEVKKRSEEVEERAKSGRDKRDIDDLIRELHRLDRELVKRLRDRIDEVVRRNEELVKRLEDEIRRLERDLERLLREVLRRTKDKDLEEKLRRVLEELKRLVDDLRRLIDEIKKRYERMVEELKKEIERVLRENEEAVKDLER

SEQ ID NO: 13117 - protein, 241 aa, Artificial Sequence; identical to SEQ ID NO: 13116
  Synthetic

SEQ ID NO: 13118 - protein, 243 aa, Artificial Sequence
  Synthetic
SEEEELEKIAREVLRELKEILEELDDIYRRVTDRLRKLLERLKKEYEEVKKELEDLKRRKADVKDLLRVLRRLVKVDMEVLDKLLEIVRELSEADKDILRRILEVVEKAVKALKDVLDRAGEPERDVKKKKDDIDKKLEELRRELEDYKRRNDERLKRLEEKIEKYKRDSRKILEDIEREVKRDGPSEELVDRLIKLLDENLKRSEEVIREIIELARKNAEDSRRVIKKIIELLREMLKDARR

SEQ ID NO: 13119 - protein, 243 aa, Artificial Sequence; identical to SEQ ID NO: 13118
  Synthetic

SEQ ID NO: 13120 - protein, 249 aa, Artificial Sequence
  Synthetic
DSERELEKVLKDAKEKLDRSLEEVKKVTRETEKRIEEIDKEVKEVLEEADRRVKKIETDKERGDEERLARELTRVVRDIVRRLKDLARKLLEVVRRNAEMNHRINRKNNKVLRDIVRRLEEVMRRRGLDEKRVRELIERLRRLLKELEKEDRRINEEYKRVLREIERKVREVSKTLDKLLRELEERLKKEGLDERLIREIKRIIERVIEILKDIAKEILDLDRESVRLDTEVLKKLLDIIREVVKEAKK

SEQ ID NO: 13121 - protein, 249 aa, Artificial Sequence; identical to SEQ ID NO: 13120
  Synthetic

SEQ ID NO: 13122 - protein, 249 aa, Artificial Sequence
  Synthetic
DEEREVRKVLRRAEELLRRSLKKAEEVTRETRKRIKELLDELRKVLERAERELRRIRREKERGDEKKLADELEKVVREIVKRLEEILRKLLEVIRTNMRRNHEINRENLEIVREIVEELKRILEERGLPREDLERLVRKLEDLLRRNEKKDKDINRRYKELVDRLEELVKDITRRLRELLERLKKRIDETGLDDRLIEEIKRILEEIIKLIADLARRVLKIDEESVKLDEDNLREVLKILEDVVRDSER

SEQ ID NO: 13123 - protein, 249 aa, Artificial Sequence; identical to SEQ ID NO: 13122
  Synthetic

SEQ ID NO: 13124 - protein, 235 aa, Artificial Sequence
  Synthetic
SEEEEIKKDLERLIDKLRRTSKRLIDDYRRVLEELERTIKRLLEELEELIDELRRRGSLEEKILKVVEDLLRVLKKLLRELLELIERNLELIKRLNEELLRVVEKILKVLAERSTADEDLTRVLKELKEVLDDLVKKHRDSLEELKRVVKRLKDELEKVLRDAKRVLDELKRDGVSEKVERALERILELLKRVIEELERLAEEVLRLSKRVAEENKKLLEEILRILEEIIRRAKK

SEQ ID NO: 13125 - protein, 235 aa, Artificial Sequence; identical to SEQ ID NO: 13124
  Synthetic

SEQ ID NO: 13126 - protein, 248 aa, Artificial Sequence
  Synthetic
SKEEELEKLVRKVEEDLKRLEEESERIKKEIKDTLRKIRKRSEDLKRKVKELLRRLEEEARRVRLEEAIKIIKEILDELAKVNEDIIRIIKELLKRLVDTNRRVIETIDRILKKLVDDLRRANLPEDKLREVERELRELKKELEEIVRESEKMLKELEDKLREIVRESRELLEKLRRDLKRIKDGNLRVDEALEMLKRLLDKALKVHEDVLRKLVELVDEVLKVHEESLRKLLTLAKKVLEVLRKITK

SEQ ID NO: 13127 - protein, 248 aa, Artificial Sequence; identical to SEQ ID NO: 13126
  Synthetic

SEQ ID NO: 13128 - protein, 244 aa, Artificial Sequence
  Synthetic
DDERRKLEDLERMVEELKRKSDKLLKEIREEVERLERETRKLLEELKRKVDELREDLRRNPEDRVLRKLVKLLEDILDKVRKLLKENLDLLKRLLDIIEKLLRDNVRLLEELLRIVRELMKTKDEEKLTRKLEKALKEVRDAARETRERLKEAKKEVKTVADRNRKRLEELEEEVKRVLDEIRKEKGPSEDLEKAERLVKDILRLNEEHTKELEDVVRDLLRKLEKHTRDLEKLVKDALDKVKT

SEQ ID NO: 13129 - protein, 244 aa, Artificial Sequence; identical to SEQ ID NO: 13128
  Synthetic

SEQ ID NO: 13130 - protein, 246 aa, Artificial Sequence
  Synthetic
SEKEELLKRLEDVLRRIKERLDELRRRYKKALDELREESKRLIEKLDKVLREIEELIKRKDRDLKDIVEAIKRLNDEHLETLKEIVKKIMRIDEEVLKKLEDIAREIKEELDRILKTLADEGLPEKKLEDIARLVTEIKEELDRILEKIRKDSTDSNKELKDIIDEVRKLHERLKRELERLAREEKSEEILRLLLELLEESIRVAREVNRLLLRLLEKNKELVEEVLKRLLDLLKKIIDIVREVIT

SEQ ID NO: 13131 - protein, 246 aa, Artificial Sequence; identical to SEQ ID NO: 13130
  Synthetic

SEQ ID NO: 13132 - protein, 244 aa, Artificial Sequence
  Synthetic
SKIDEALKKLRKILEDAIKLNKELNDTTREILKEIIKLNREVLEKIRRILKELVDLILKDLKDDEEAKKELKKVLEEVRRRLEEIKKETDRIVKEVEELNERNDREVKRAAEEVRRLLEEIKRSDRDEKELIKKLKEIVDRIREAHRRSVEELSEVVKRILDALKDTLRKLEDVVRKLLELARRIAGDTEELRRVVEKVRKELEDDKERYKRLEEEVRRLLEEMKRRSEDLERKVEEILRRLTE

SEQ ID NO: 13133 - protein, 244 aa, Artificial Sequence; identical to SEQ ID NO: 13132
  Synthetic

SEQ ID NO: 13134 - protein, 237 aa, Artificial Sequence
  Synthetic
SEKELLEDLRRKAKEVKDRHEELLRDLERTLKKLKDEHDKKLKDLRDELRRVEKKLDDKERTEALERVKEVLRKLLKLVEDLVRRNKEVIDKLLELVRELIERNKKVLEELLKLVEDLSRKRSEDVERVIRELREILRKLHETNKRILDELRRLLEELERENRKILEEAKRLLEELEKKVDDKELLKEVKDLLRKLEKVVRDSLELLKRLLEDIEKRVRDSNRELKRILDDIEKKAK

SEQ ID NO: 13135 - protein, 237 aa, Artificial Sequence; identical to SEQ ID NO: 13134
  Synthetic

SEQ ID NO: 13136 - protein, 235 aa, Artificial Sequence
  Synthetic
DKEEELLKKLEEVLKKAEDLIRESNKALKELLDEAVKIVEDSLRELERTLRDIERKVDKDEVIRRLRELVRELTERNKEALTRLREEFKRLHDENKKILDDLRKLVDELRERVKKTKDSETIIRLISKVLDDLLRLLDELVKRNTEALKKLIKLLEDLVRENKRVLERLVELVKRATGETEDLRETEKDLRRLSEEHKRLLEELRDKARRLTERHEKALKEIEDELRKIKDEARR

SEQ ID NO: 13137 - protein, 235 aa, Artificial Sequence; identical to SEQ ID NO: 13136
  Synthetic

SEQ ID NO: 13138 - protein, 239 aa, Artificial Sequence
  Synthetic
DEEEKIREDLERTLREYERELRRAKEELKETLKRYEEELREVKEDLDRTLEEVDDLLRRGELEDREAIRILRELLKKLEEIIRRSKEVLDKLIKDLEDISRRSIEVLEELVKKVRKDGLPEEVLRRIKDLIRRLRERNKEILDRIRKLIEELVERNKRALDRLRKLIKELEERVRRTDDKKTLLRDLKEALKTLIKLIREILEDNLRVLRRIIELIETLLEDNRRVLEEIIKLIEEATT

SEQ ID NO: 13139 - protein, 239 aa, Artificial Sequence; identical to SEQ ID NO: 13138
  Synthetic

SEQ ID NO: 13140 - protein, 238 aa, Artificial Sequence
  Synthetic
STKEEVERIVEELRRAHEKSLRDVKKILDDLAKIHDDSLEDARRIIEKLDRILEEIKDRDKSREVVETLTRLLEEIEREIRELVRKNRELLRRITERLKELVRRNEDVDRRVREKVERVPISEELLKLIEELSRTNRRVLEALERLARELLKTNERVLEELKKLLDRLLELVKRITDDGVEDDKLLEDVKEEIRKVKERIEDLLRRSRELLERLRKRLDDLLADSERKIDEVTKRTRK

SEQ ID NO: 13141 - protein, 238 aa, Artificial Sequence; identical to SEQ ID NO: 13140
  Synthetic

SEQ ID NO: 13142 - protein, 244 aa, Artificial Sequence
  Synthetic
DELEKVERLLEEIEKIIEDLIRRVEELVRRILEFNKTTLKRNEELVRELEKLVEETTGRTEELKKIVEKLEKLHREVKKKSDDLVKRAEELLKEVKERLKEIVKTIREELRKVKESDRDRKELLKLLAEILDKLLKLLKRIIEELLRILKELIKASKESLDDLKRINEELLRDIEDLIRKKIKEKKEVVRKLEEDLRRVRERSKKLVREHEKFLEDLEETIKEEKRRVDEELKRIKEEIKETRR

SEQ ID NO: 13143 - protein, 244 aa, Artificial Sequence; identical to SEQ ID NO: 13142
  Synthetic

SEQ ID NO: 13144 - protein, 242 aa, Artificial Sequence
  Synthetic
SEKERLMRLLDKLKDLNRRLVERIKELLDKALELHKKLVKELRELLERLKELVERAGVPEELLTRIDELIKKLEDEARKISKEVKRLIDELKKRLEDIHREVDRLIRELKETLKRVTDKDELLRRVKEVLERIARLSEELIREVKEVLEKIVELSRELLKRVLDVLRRIAELLEDALRKENVEEETVRRLREALKKLEDDLRKIERDAEREYKKLKDELEELTERYRREIRKLKEELKKDRK

SEQ ID NO: 13145 - protein, 242 aa, Artificial Sequence; identical to SEQ ID NO: 13144
  Synthetic

SEQ ID NO: 13146 - protein, 243 aa, Artificial Sequence
  Synthetic
SKREELKELLERLLKLDRDTLEELKRLLDELKKTNDDTLEILKRLLEEVLRVIRETGLPEDILRRAEELIRRLKKKLEEIVRRNEELIRRLREDLKRIHDEIRKLIEDLKRDLDRTKDERTILKLVKEVLERISDLNRKILDSVRRAIEKDVKSNEEILDLVREALERLAKLVEDAVREKIREDKDRVREIERRLEELRKRLEKVERDLRDRHRKVKKKLDDVIEKVKRRHDELRKELEDAER

SEQ ID NO: 13147 - protein, 243 aa, Artificial Sequence; identical to SEQ ID NO: 13146
  Synthetic

SEQ ID NO: 13148 - protein, 250 aa, Artificial Sequence
  Synthetic
KDEEEVEKEIRRLLEKVKDVLRRSLEELERLLREIKEVLEKLEREDEENIERIKRELERQLPSEDLLRVVEELIRSNVTLSKRALDEVKRLIRRLVDVSRRALEKAIELIREAVELLERALKRKGLPREEVKRLRDEIKKIEDRLKELLRRYEEEVEKIERRLEELIRRYETEVERIERRLEELRRANLDRETLIREIEKILRRLNELNRRLLREVERILERLLELHKRLLDELLRIAERLMRLVEEVKK

SEQ ID NO: 13149 - protein, 250 aa, Artificial Sequence; identical to SEQ ID NO: 13148
  Synthetic

SEQ ID NO: 13150 - protein, 247 aa, Artificial Sequence
  Synthetic
SEAEDLEELIKELAELLKDVIRKLEKINRRLVKILEDIIRRLKEISKEAEEELRKDTVEDKDILRDLERRLREILEESDRLLEELKRRLEEILRKSKELLRRLEEVLREILKRAEEVKRSNLPKEELIKEIVKLLEELLRVIEKILEDNIRLLEELVEVIKEILEKHLRLLEELVRVIERILREVRKDKDEAERRRRELKDKLDRLREEHEEVKRRLEEELTRLRETHKKIEKELREALKRVRDRST

SEQ ID NO: 13151 - protein, 247 aa, Artificial Sequence; identical to SEQ ID NO: 13150
  Synthetic

SEQ ID NO: 13152 - protein, 242 aa, Artificial Sequence
  Synthetic
DEVEKLKKLLKELEELNREVVDTVKKLLDELVKLNRDVLREVRELLKKLIDALEKTGIDDTVRRRLEDIERELEKVLEDSERKLRRIKERLDEVVKESKERLERLREELDRLARSNLPREELLDAIARVLRKILKVHEDALRKIEKLLRDLLRIHRTSLREIERLLRELLEVIRDVLDKRNVDEELRRELKKLEEEIERALERIRRRSEETADRIRRTLEKLREKSERKRREIEDTLRKDRK

SEQ ID NO: 13153 - protein, 242 aa, Artificial Sequence; identical to SEQ ID NO: 13152
  Synthetic

SEQ ID NO: 13154 - protein, 249 aa, Artificial Sequence
  Synthetic
SLLEKVKKVIERLLEIHKKLLEELKRLIEKVLRITRENLEEVKRLIKRAVEILRRIAEEKDKDTVEKLIRDLERELEKVLDDSRRLAEELERELEKVLREWEEKSKRAMEELDEVIKRLIKEAGDRSEKLRIVEEIVKDLERADEDVIRKVKELLEEHLRLHRELNRLIKEVLDDLLRALRELAESRTREEEVTRKIEELRKKLTKLIRELEETLKEVKKRNEDALRRLEKESKDLAERVRRLIEELEK

SEQ ID NO: 13155 - protein, 249 aa, Artificial Sequence; identical to SEQ ID NO: 13154
  Synthetic

SEQ ID NO: 13156 - protein, 240 aa, Artificial Sequence
  Synthetic
SDKEEIKRRVEKTARDLETEHDKIKKRLEDTVRDIKRELDELLEKYERVLRKIEKTLREGDKDVTDLVDKLLETVKRLNEEVLRTVKKIADELRRLVEEVLRVLRESNETLARLLEEANVRDEVRERLEEVLRRTEEIIKTLEEIVKRLLDELRRLVEELRRISKKLKDELDKIKEKDKDEKRLIEEVVRLLRENLDVVRRILEALAKLIKELLEALEEVLRRNKELIRELLRVLDEALK

SEQ ID NO: 13157 - protein, 240 aa, Artificial Sequence; identical to SEQ ID NO: 13156
  Synthetic

SEQ ID NO: 13158 - protein, 248 aa, Artificial Sequence
  Synthetic
DEEERVKKLLTDLRRLLRKLHEESKKLLDELRKKLRELRRRSEEKLREVERRLREAEKKLPETRVLKLVADVVKKVLDAIRDLNRKLEEIIDEALKLLEELDDILRRVVEEALRLLKEIKDTKRDRKEVKKRVEDILKRLEELVKEYEDRVREIKKRLRRALEELRDEYRKIREDIERVLDELRKGGVPEELLRVLEELVRTLKKLLDENLKMVERLIRELEKVLDDHERKVRRLIEELLEVLDRDAK

SEQ ID NO: 13159 - protein, 248 aa, Artificial Sequence; identical to SEQ ID NO: 13158
  Synthetic

SEQ ID NO: 13160 - protein, 248 aa, Artificial Sequence
  Synthetic
DEDRIIEEIARLLEELLRELLELIKKLIETNRRLNEEHERAVRELARLLEELLDRLVKKVIEDEKLKRIRERLKRALDDLERLHREINKRLEDLVRELEKLVREILKELKDALEELRRASARAGGEEVLRRLEEIVKKLLDLVRRILERLKEIHKDNVRLLRELNERLTRIVEDLVRLIREILREAGVDEKIKKEIERELEELRRMIKRLHEDLERKLKESEDELREIERRLEEKIRRLEEKLERKRR

SEQ ID NO: 13161 - protein, 248 aa, Artificial Sequence; identical to SEQ ID NO: 13160
  Synthetic

SEQ ID NO: 13162 - protein, 251 aa, Artificial Sequence
  Synthetic
STEEKLRELVKRLEELLRDLERLLRELEKSNRDLNETALRLVEESDKLLEELLEKLARNNVVDEELLRRARKELKRLIEENKKIAKEINDRTEKLVRELRTLLDRLREELKRLIEELKKLLKDGLPDEDLLRDVKRAVEEVLKILRDLLTKVEELDKRNVDLLRKWLEVNRKIVEDVLRILEELLKRDAREDKDTVKRLKEDLDKARKDHEKKLEDLERLLKRNEERLRKMKKELEDKVERLRRELEKKRK

SEQ ID NO: 13163 - protein, 251 aa, Artificial Sequence; identical to SEQ ID NO: 13162
  Synthetic

SEQ ID NO: 13164 - protein, 251 aa, Artificial Sequence
  Synthetic
DEEEKIRTTLDLLRKLLKVLREILEELIRSNKELNERLLRLVEDSDRLLEELLKKLEDDNVVDEEALRRIKKRLEDLIRTNREIEERIDRESERLAEELRRILRELEKELRRLIEDLKEVLKRGLPREELLRRLKKVVEDVLRILEEVLRVVDELDKENVRLLREWLERNKEIVEEVIRILEDLIRKRAREEEEKVRDTEKKLRDLREKHKEIAKELERLLRENRRRLEELKREAKKVLDELRKRLEDERR

SEQ ID NO: 13165 - protein, 251 aa, Artificial Sequence; identical to SEQ ID NO: 13164
  Synthetic

SEQ ID NO: 13166 - protein, 240 aa, Artificial Sequence
  Synthetic
SEKEEVEKRLKDLEEESERLLKEVRDTLKRLEEESKKLIDELRRKLEELRKEVKELVDRGRDVKDLARELLRLLEELLRDLKRVADESARRNEELVKELKRLIDESLKANTDLAEEIKRTDNTDERKLRELERVLEEYRRRIERLKEELDRVLEKWKTEIKKIKKELDDVLRKAEEEVEKNKTVDKALTKVVDDVLRVLERVIERLLRLNKESLKELERILEDLRRLNKKTLDVLREVTR

SEQ ID NO: 13167 - protein, 240 aa, Artificial Sequence; identical to SEQ ID NO: 13166
  Synthetic

SEQ ID NO: 13168 - protein, 240 aa, Artificial Sequence
  Synthetic
KEKEEVEKKLKEAEEEHRRLNREVEEDLKRAKRESERLLEEMEKKLDELEERVERLLREGRDVDDLIRELLKRVRDLVRELKKLIDESAKLVRELVKRLKKLADDNLELVRRLVKEIIDRINTTEDIIRELKKVLEKYEKRVREIKKRLDEVLKKWEDEIRKIKEDLDRVTKKIEDDVRKNRNVREVLEKLVRDALRTLREVLDRLRRLNEELLEVLRRVLRELERLTRELLKVLRDALK

SEQ ID NO: 13169 - protein, 240 aa, Artificial Sequence; identical to SEQ ID NO: 13168
  Synthetic

SEQ ID NO: 13170 - protein, 250 aa, Artificial Sequence
  Synthetic
SEAEEVARRIKELVRELEKLLRDSEETIKRLIDKNRDLLRRIAETIDKLIKDLRDLLRRIKGEDLLEAIKRAIKTAIDVLDKLLKLDKTTLEELIRVLERNLEEIRRVVEELIEVLRELARRRRVSEEIKRRLEEKVKELRERLERARKRHKDAAKRLRDSARKLEEELRRLADELRKELEELERQGDVKDEDVRRALERVEKLLREILERLKRHSEELAELARRLLDENRRIIEEIIKLIEDILRELKR

SEQ ID NO: 13171 - protein, 250 aa, Artificial Sequence; identical to SEQ ID NO: 13170
  Synthetic

SEQ ID NO: 13172 - protein, 249 aa, Artificial Sequence
  Synthetic
DLERLVEELARLLKEALDTLARHSERLIKLAREILETLRRHSERIAELIERILRELMERRGRTEDIERVKKRVEDIIEKNKELLRRIKRRIEELAKKNRKLLDEIRRRLEELIKRLEELLREGRPEEEALRLLAEMVRRALEVLKELLRRDAETVEELLRVLKELLELNERTIRELETILDELVKRAGLPEELKKKLEDISREIKKSLEEVEERLRRISDDVRRSLEELKRILDEIEREIERRLREAKR

SEQ ID NO: 13173 - protein, 249 aa, Artificial Sequence; identical to SEQ ID NO: 13172
  Synthetic

SEQ ID NO: 13174 - protein, 246 aa, Artificial Sequence
  Synthetic
SDEERLRKEIRDRVEELRKRLDDTEEEYDKRIRDLRRKIKEVEDRYREKIKRLEEKLRRGELSTELLLEAIARTSEEVNRILEELLREIADLSREVLEKLRRLAKELEDLVEEILRKLLARRDTERIREIVRKLRELVDEVRKRLEDIIRENEELLKKAEEDLKRIVEENEKLIRDAADRIRKIKDKDTVLRILKELMDRDEEILRRILKLIKELLDESKKTVRRVLELLKELLRKILKLVEEITR

SEQ ID NO: 13175 - protein, 246 aa, Artificial Sequence; identical to SEQ ID NO: 13174
  Synthetic

SEQ ID NO: 13176 - protein, 237 aa, Artificial Sequence
  Synthetic
SKKEILKEVLRRILKLIRELIETIKKVLKRSLDLNKELIDINKEALDRILKLLTDIGLPEDVLEEIKRAVEKLKKRYEELLKKYKEDLERIKRRLEKLKEEIERKVKKLEELVDTISLEEVLERIDKLVEDVLRTVEEVLEELRKLNKESLDTSREMLRRIKELVKRVIEELERAGIDKRRLKKLADELKEILDRLREKNKEIADRAKELHDEVRERLKEIAKRLKDVLRDARERVR

SEQ ID NO: 13177 - protein, 237 aa, Artificial Sequence; identical to SEQ ID NO: 13176
  Synthetic

SEQ ID NO: 13178 - protein, 238 aa, Artificial Sequence
  Synthetic
REMEEVLKRNLDAARRVLETLKRILDRLKELNERSLRSLRDILRELLDIAREVLDLRRAGSSEELKRRTEEKIKKLVKEIDERLEDLLRRYEEEVKKIEETLERLLREYEKLLKKIREEMGDEDEKVKKILEVLERSKKIIKELLEALKKVAKDSLRLNRELVKVIKRVIEEIRRLIREQDDIEKVRKDVEDLAKELEDRLRDVERESRRLLEELRETLERALRRVKELHDELREAIK

SEQ ID NO: 13179 - protein, 238 aa, Artificial Sequence; identical to SEQ ID NO: 13178
  Synthetic

SEQ ID NO: 13180 - protein, 237 aa, Artificial Sequence
  Synthetic
SRKEELLRILRRILEIAEEIIRDLKKWLDDDRELVREILELIKRLNEDNNRLIREAGLREEVLKELEDRSEDLKRKLEKLREDYRRELKRIEDKLEELKERLRKVVEDLERLIEKMDDKEVLDELRRLIEEAVRALEEVLKEILELSKTVIERLKDLLEEDKKIVKKVFDMLRRDDKREDELRRLEEALKESKRLVEEVLKRIEDVLRESKKLADEIRKKIEDLVRELEEELERVAR

SEQ ID NO: 13181 - protein, 237 aa, Artificial Sequence; identical to SEQ ID NO: 13180
  Synthetic

SEQ ID NO: 13182 - protein, 244 aa, Artificial Sequence
  Synthetic
SKEEKKKELEKKAREIKRRLEENKREYKEKVDRLKEELRRLLEEIREKVKRLEERIRRAIDKEEVVRLLKTILEELLKILEEVLEEIDRLVDENAKAHKRLLDVLKKILEDLLRILEDVERRDKSRELEETVERRIKRLEEKIRKVEEEYRRVVETLKREYKKILDKLEKLAEELKRKIEEVRKRNVLKDLVKELEDVLKELLDLLREILKTVKRVNEDSVRSAEKLIEDLERMIRELLKEARK

SEQ ID NO: 13183 - protein, 244 aa, Artificial Sequence; identical to SEQ ID NO: 13182
  Synthetic

SEQ ID NO: 13184 - protein, 234 aa, Artificial Sequence
  Synthetic
DERERIEEDLKRLRDTLDTKEEESRRRIRELEEDLKRKIEESRRRIEKLKRRMEEDGAPGELVEILERAERANERNLKLIAAILDLIKKANEETLREIRRILDEIERVIRELERLDRREDEVRKRLRDILRKIREEIKKIERRNDKVLRDIKELIDRIKTHLKKVLDDVKRLLDEIEPSEILDRLRKVLEELARRDRKILEDLERAVRELDKLDRDILRTLLRVAEELLRRREK

SEQ ID NO: 13185 - protein, 234 aa, Artificial Sequence; identical to SEQ ID NO: 13184
  Synthetic

SEQ ID NO: 13186 - protein, 252 aa, Artificial Sequence
  Synthetic
DKLEEILKLLKEVIKTLLRLSEDLNRLNRELVRTVLELLKRVVELLKRVLEEVRKKVRDANTVPDEVIERVARELDRLLKELEDDIRRVAKELEEVHRENEKLLRDVVRDLERLLERLKRELDRNLPEKDLLKTLEDVLRELLKIIARLVELNKRSNRRSTEIIDRIVKSLERVIEELLKIIDKLAKALDDRRDKVERDVRRIKEKIKRILDDLRRRVEELKKKNKEDLEKYDEDIRRLEEEIKRLLEEARR

SEQ ID NO: 13187 - protein, 252 aa, Artificial Sequence; identical to SEQ ID NO: 13186
  Synthetic

SEQ ID NO: 13188 - protein, 235 aa, Artificial Sequence
  Synthetic
REEKELLDEIRKRVKESEDRLEKLLRDYEKELRRLEKELRDLKRRIEEKLEELRRRNLDFKELLKTLEDLLREVLEVARRVVETLKELNRRVLEVVREDIERNERLLRRVLDTLRRKGVDERRIKDLERLIRESLKKAEEVLREAAEKSREIVDEIREVLKRADEALKRIIKKIRETRGKDALSRLLEELLRVVDDLIRVLKELIDKSRKVIEELLELLKRINEENLKVLAEIIK

SEQ ID NO: 13189 - protein, 235 aa, Artificial Sequence; identical to SEQ ID NO: 13188
  Synthetic

SEQ ID NO: 13190 - protein, 242 aa, Artificial Sequence
  Synthetic
SRKEKLLKESEEEVRRLRRTLEELLRKYREVLERLRKELREIEERVRDVVRRLKEVLDRKELDIDTIIKEVEDLLKTVLDRLRELLDKIRRLTKEAIEVVREIIERIVRHAERVKDELRKEGADKRKLDRVDRLIKENTRHLKEILDRIEDLVRRSEKKLRDIIREVRRLIEELRKKAEEIKKDPDERLVKTLIEDVERVIKRILELITRVAEDNERVLERIIRELTDNLERHLKIVREIVK

SEQ ID NO: 13191 - protein, 242 aa, Artificial Sequence; identical to SEQ ID NO: 13190
  Synthetic

SEQ ID NO: 13192 - protein, 234 aa, Artificial Sequence
  Synthetic
SEKEKLREIIKRHLRSVEEVLRLLAKILKDLTDASEENLRLLKELLRRLLEVIRKLVEDVKLDEKILRELEEDIRRLEEELDRLTKELRRKNREALERLRKLVEELRRKHERLERELKDIDKEDILRILADLSRKLKETVEEVLKYLRDHLKEDEDITRRVLDVLRKIVKKIEERARDEDALRKLKKKLEEIEKTVKDSIDKLRELLEELERRVRKIAEENKRLLEELVREVKK

SEQ ID NO: 13193 - protein, 234 aa, Artificial Sequence; identical to SEQ ID NO: 13192
  Synthetic

SEQ ID NO: 13194 - protein, 235 aa, Artificial Sequence
  Synthetic
KDEERLEDELRELTERMREKLKEHEERVRELSKEVKRKAEDSEEKLKKDLKEVEDTLRKKSEVDERALRLLRDILRKLIKLHRDVLERLKRILEELEKLDREVIEKHERSIKRLIEVTKRVRDRETARELLKRLLEDNRRALEEHKRELDKILKKLEEVLRDARRRHDDLLRELRENPVTEELLERIERIIRTSKKLLTEALEIIREIIKRSKDSNRDLHRDLEAILRRIEEAKK

SEQ ID NO: 13195 - protein, 235 aa, Artificial Sequence; identical to SEQ ID NO: 13194
  Synthetic

SEQ ID NO: 13196 - protein, 243 aa, Artificial Sequence
  Synthetic
SDEERLVAELERLIEISLRILEELLEVLRRLVEESLRLLEELVKVAEEIIERLLRLLEETVKDEDRLREIKEELRKLKEKIKRLVDEVREEHRDLLRKIEDLARRVRKKHKELKDKAKEVTKKVRGRERVLKRLSELVKELEDIHKDVLRELKELIDRLLTINKRVLERIDRLLKELLDLVRRDTGDSERLKKTADEIKKRLDKVRKDSDDLAEEIKRILKRVEDESRDTARKVKKVLEDAKR

SEQ ID NO: 13197 - protein, 243 aa, Artificial Sequence; identical to SEQ ID NO: 13196
  Synthetic

SEQ ID NO: 13198 - protein, 235 aa, Artificial Sequence
  Synthetic
SKEDEVLERLKRAIERSIKIVEEIVKRNVETNERSERILRELAETLRRVLDTIRKLLEDKVDEDTLREILERLRRELKELMDKSREELKRNEETLRKLEDESRKEIKTLRDLIKKRIEELEEVKRVVEELIRVHEKVLEDSKDSNRKSVKVHREALKAAEDLLRELDRVLEVATRGDISEEELKRRLEEIERKLKEVLDRLKKKHDDDNKENKDVLDEVRKRHKELLDKLREKRK

SEQ ID NO: 13199 - protein, 235 aa, Artificial Sequence; identical to SEQ ID NO: 13198
  Synthetic

SEQ ID NO: 13200 - protein, 236 aa, Artificial Sequence
  Synthetic
DEEEKVLRILEELLKEHKRVLEELLELVRRIIERHKEVLKRVLKLVEDLIRRIKEANREGRELVKKLEELLRELEEALKRSEDELRKILKELEDLIRKSLRDLERLLKELEDIIRENRDEKDLRRVITEVLKRVEKIHRRVLKEIKKVLKKLLDNHRKALEEIARVLKRLAEIVREANLPEEAAKEVEKRLEEVKTDLRRLARESEETLRRVEERLEELKERSERELKRVEEEIRR

SEQ ID NO: 13201 - protein, 236 aa, Artificial Sequence; identical to SEQ ID NO: 13200
  Synthetic

SEQ ID NO: 13202 - protein, 231 aa, Artificial Sequence
  Synthetic
SEEEELKRILDENHESLKDLLREIKEILRANHETVKKLLETIKEILDTVLKILRDVGLPEDVLRELEKLVRDIKRKLEEALKRHEEKLRRITKELEDMKRRHEEDLRRIREALKRGEIDKDAIADLLRKSLEIVRAILEKIKKVLEESHKTLRDIVRDIEKVLEDLLDMLREARVPEELLETLKRLIRELVKRLEKILDDDRKLIDRLVRRLEEILKEDKRRIEEALERLR

SEQ ID NO: 13203 - protein, 231 aa, Artificial Sequence; identical to SEQ ID NO: 13202
  Synthetic

SEQ ID NO: 13204 - protein, 244 aa, Artificial Sequence
  Synthetic
SELERAEELIKKLLKLHEDVLRRLTEVDDELLEIHDRVLKRLKEVDDELLKLIRDMLRRANISEDLVREVEERLKTLEKRSRDKKRENEKKLRELKKKSEKLRRESRKLLEELRKKVEELRNVDKKDVEKLIKEIVEVHRRMLEKWLRLNEEIAKVHEDSVRDWLKANEEIARTIEEILRRVLRGDEEAKDIREKLERLLRKSEELVRKSLKELKELLDKSKKLLEDSKRRLEEILKEIKDDSR

SEQ ID NO: 13205 - protein, 244 aa, Artificial Sequence; identical to SEQ ID NO: 13204
  Synthetic

SEQ ID NO: 13206 - protein, 237 aa, Artificial Sequence
  Synthetic
DEEDEVEKLIREAIELNKRILEEIKELIERIVRRNKEILREAKEAIERLIKIARDLTKDKSDEKTIEDVLREIRKRVKDLEDKLREANKRLKDDLDRLTRKLEDLHRRLKEKVDRTVEKDKDGQELKRVLDEILDVDRETIKELEDILREIHRIDKETIDRLLEILERILRALEEIAREKDEEKLERIARELKKLLEEVERRSRKAIEDLKRELKRVMDRSREAERKLRELLKETKR

SEQ ID NO: 13207 - protein, 237 aa, Artificial Sequence; identical to SEQ ID NO: 13206
  Synthetic

SEQ ID NO: 13208 - protein, 243 aa, Artificial Sequence
  Synthetic
SEDEVLKKIEDELREVEKKLEDVLREIKRRHDELKKRLDEKLERLRRRHEELKEALDRGEVDIETVRRVVEENVRTDKRILEEAKKVVEENARTDKKLNDEVRELLKRLVDKLRKTVRSDETKLRDLDRVLEKLKKDLKRVIEETRRVLEEVKEALDRILRESERVLREVEKRLEEIKRSPKREEEVKRDLKRILDRLLEVNTKSIEDLKRILDKLLEVNRRNVDEIRRILDELRKVIERVTK

SEQ ID NO: 13209 - protein, 243 aa, Artificial Sequence; identical to SEQ ID NO: 13208
  Synthetic

SEQ ID NO: 13210 - protein, 235 aa, Artificial Sequence
  Synthetic
DETERVKEVLDRSLKLNEDLLRKIDEILKRLFEINKEVIDIIRELLERLVRIAREVLEKNNVPEDKKRELEKILKDVEDELRKYEEELKKKLEDVERRLREYLKRLKETLDRAREILRDTGARREVVKKLIDDSLELVKRLLEEVADDIRESLKRLEDLLRRARRLAEELERLLRELNVREEVEKRIKKLLDDLEKVAREIRKKHKELLEELEKVAREVMDAHRRLLEDLKRTDD

SEQ ID NO: 13211 - protein, 235 aa, Artificial Sequence; identical to SEQ ID NO: 13210
  Synthetic

SEQ ID NO: 13212 - protein, 244 aa, Artificial Sequence
  Synthetic
SLKEIVKEIIDRASELLKRLLERSEDSLRTASELLRKILEDSRRSLRTIARLLEELLRTDGPEEELERAARRVKEELERLHKEIRDVIEEIKKTLKKLNEDLREAIERVKRELERLLKELEDSGVPRELLELVKRVVELMAELLDRLLKLNEKILRDIMKILDEILDLNREILRLVKEIIELIRRDGPDREIEKEIRRILEELKRKHDEIEKKIRELEREIKRKHEELEDRIRKIERDLDRRTK

SEQ ID NO: 13213 - protein, 244 aa, Artificial Sequence; identical to SEQ ID NO: 13212
  Synthetic

SEQ ID NO: 13214 - protein, 244 aa, Artificial Sequence
  Synthetic
SLRELVEKILRDAAKLIERLLKLSEEVLKRIEELLEELLRLSERSLRELLRLLEELLRSTGPEEELERLADRVRREIDKLNKEVRDALERVKEELKRLHDEVDKVIKEVKETLKELLKRLKEKGIPKDLLKLIEDVLRLVMTILDEIKELNERLLRLIEEIIDRLLELNNRLLEEIKRIIKRIRETGPDKDIKKELDDIVRDVKRKHDKLREELKKIVEDAERAHRDIDRKIREILKELKERTD

SEQ ID NO: 13215 - protein, 244 aa, Artificial Sequence; identical to SEQ ID NO: 13214
  Synthetic

SEQ ID NO: 13216 - protein, 241 aa, Artificial Sequence
  Synthetic
REEELRKKIEDELRDLKRKLEDLLRRYEEKLREAEKKLKDLLRRYEERVREIKKELSRNSDEEVVKEIIERLRRSNKELEEMIRELIKILEEASKELEDLVREILEAIRRILKELRDAGALKEKVERDAKKLLDDLRELLERILRESRRLIEELKELLKEVKRRSEELIRTLKEVLDRVKGEDELLRVLEKVIEDNLRIVEELIRRLEEVLKRHEDLVRTLLDLLKRVLEAVKKLLDEAVT

SEQ ID NO: 13217 - protein, 241 aa, Artificial Sequence; identical to SEQ ID NO: 13216
  Synthetic

SEQ ID NO: 13218 - protein, 242 aa, Artificial Sequence
  Synthetic
SSEELLKRIVDEDERVLEEWRRVLEEIKDLSKRVVDLLDKVLKEIEKIVDEVTRRLERDGTDDKKKIRDLVEEIKDIIRRAREKLRRIVKENEEILEEAKRRLDKIAEDNRRTLEKVRKELEETKEEREVKRILERVLREAEDSHRRAVELLEELLDRSRRTIEEAIRLIKELLDRILELLKRLGLPKDLLETIKKRVEEIRRTLEKIKRDYDKAIEEIRRKLERKLEEYKEVIDDLRRKTK

SEQ ID NO: 13219 - protein, 242 aa, Artificial Sequence; identical to SEQ ID NO: 13218
  Synthetic

SEQ ID NO: 13220 - protein, 234 aa, Artificial Sequence
  Synthetic
SSDELLEEIIKEIARLIEELLEILRENLERSEESLRRVLRAIDDNLRRVERLIEALARGEKREDDVVRDVDDSNKKLEDTLREVVKENEKSNEELKRRLEEVVERVRRLLTELRKREEDEKLEDVLRLVEELLRRLDEILKEHEEDNKRLLDLLRDIVRRHKEEVKRALEVARRKEEPKKAMDEELEKIRRDHERLKKEIEDRLRELKDKHRRAFEELKKMLDDIKRKVDEAKR

SEQ ID NO: 13221 - protein, 234 aa, Artificial Sequence; identical to SEQ ID NO: 13220
  Synthetic

SEQ ID NO: 13222 - protein, 247 aa, Artificial Sequence
  Synthetic
DEEEILREILRVAEELSRLNEEVNKRVLEVLERLSRMNEKLLKEVKDVVDRLIELRRRKDLRERELEEELRKLIEELERRLEELERAHRKLVDELRKLLETLKRRHEELARRLRKLLKDVVDEKKRELEEIKRIVEDIERALEESLRISEEIVRTILKALKESLDRIDRVVKEILRLLKELKDSDRDDKEVKRRIEKALRDIEELIERILRRNEEVKREIERLDEENRRRNKEALERIRRLIEETKR

SEQ ID NO: 13223 - protein, 247 aa, Artificial Sequence; identical to SEQ ID NO: 13222
  Synthetic

SEQ ID NO: 13224 - protein, 247 aa, Artificial Sequence
  Synthetic
KDEEELKRRVEKVIRDLERKLKDLEEDHRRVLEELKRELEETKRRLDKVIEEIERVLRRNEKPEDFALEEIRRLIEESIKTLRDLLRKLIKLNEDIARALKEIADEIRKLIEEIVKELRKKERDEDKLRKLEEDLKRLLDKVEKVLRDVEKELTDHNRDAKRAIRELEERYEEIEKEIERLRREVRGKERLIRVLEEILRLVLRLHEEVVRLVRRLLEESHRILRKIVELLREILEDLKKILDDIRR

SEQ ID NO: 13225 - protein, 247 aa, Artificial Sequence; identical to SEQ ID NO: 13224
  Synthetic

SEQ ID NO: 13226 - protein, 233 aa, Artificial Sequence
  Synthetic
DEEDEIRKRLKELLDDVKRRLDELRRESERLLKEVDDLLRESKKRLEDEKKKLEERGLSEEVKKVLKELERVHDENLKLIRDWLEKHVRINETLLKLIAELLKILEDVMDELTKDRTTKERVERLLRTLEEVLKEVADRIRKLSKKDKEDLDDILRRSKESNERLREVIKRLAEKGVDKEVLERLEKIVRRNEEVNDEVRELVTRLNETSNRAARELLELAKRIIEEIKKAVK

SEQ ID NO: 13227 - protein, 233 aa, Artificial Sequence; identical to SEQ ID NO: 13226
  Synthetic

SEQ ID NO: 13228 - protein, 235 aa, Artificial Sequence
  Synthetic
SKLETIKELLERLHELNERAVRELKKTLEDLHRDNARLIEELIRKNERLLEALREKVRDERLLTELTKLNEESIKRLEDILKKNRDLLERIKEDLDRLLKKNEELLRDIKRRLDETNSREEELIRVAEEVLRRDKKSHEELLKIAAEVIKRDKESHDELLKVHRENLELIERVLKESGLSEDADRDVKRLKEESEELLRRSKKRADDLKREVERLLEESRRRLDELLKELKDRSK

SEQ ID NO: 13229 - protein, 235 aa, Artificial Sequence; identical to SEQ ID NO: 13228
  Synthetic

SEQ ID NO: 13230 - protein, 245 aa, Artificial Sequence
  Synthetic
SRLEEIKKLLEKVMELIRRIAEELLRINEKVLEVLERIVRTILRLNEEHLKDVRDIARKLKLSDEILRRAEEIVKRSKEELKRLLEEAREIVKKSKRKLEELLKRIEEVVRDAKRKLDENKDSDERTLLEILKRILEELRKLIEELLRIHEESLRRIAKILERILRLNDKSLRDLERIVREAVRERNDDSTEIRKRLKELRDKNEELKKKVEEMIRRLEEESKKTKKRVEEILKRIEEEVREKAR

SEQ ID NO: 13231 - protein, 245 aa, Artificial Sequence; identical to SEQ ID NO: 13230
  Synthetic

SEQ ID NO: 13232 - protein, 237 aa, Artificial Sequence
  Synthetic
SREETLRERIERIKRKSEEDVERIKRTLDREREENEETVRRIKETVDRLREEVERELKDDKSLEEIIRRLTELLKKLLEVHEDALRRLDELVERVLRVHEEVLEELKRLLELLEAGLDRKDVRKRLKDILERVRRLHEKLKEELKRILDEYEKKLRELLKELKDILKDAEELLKSQPKSRELDRVEEIIRRIVKKLEEILRDLKRRAEDHIRRLTELIERSLKIVRDLAEDIRRAIE

SEQ ID NO: 13233 - protein, 237 aa, Artificial Sequence; identical to SEQ ID NO: 13232
  Synthetic

SEQ ID NO: 13234 - protein, 238 aa, Artificial Sequence
  Synthetic
DADELLRRLAEEVERVIREAEDLLRRWKETIKKVLDDLKRLLDELKKRNEDVIRELTKTKGDEELAKLIKDLLDTNEKVNRDLLRLIKKLLKDAERVNRRLLELIEELLEELKRVAKDLGLREEADKKLRDIADRARKELEDYERRLKELLKTVEDALRKAEEDSRKLKRDVEELLERGRLRKDDLEDILRKNLDRLRKLLERLREILRENLEALKKTLKRLEDVVREILEDLKRERK

SEQ ID NO: 13235 - protein, 238 aa, Artificial Sequence; identical to SEQ ID NO: 13234
  Synthetic

SEQ ID NO: 13236 - protein, 238 aa, Artificial Sequence
  Synthetic
TEKELLEELEEDVKRVIEELERLLREWKEELRRVLEESERLLRELRERNKRELEDIRRIKEDEALRERLKRLLETNDEVNKRHLKLIEELLRRIKEVNRRLLEEIRKLLEKLKEVLDRAGLDEEAKERLERILREVEADLRRYEKELEDLLDKVKKELERTREDSKRLVDEAKKLLEKNKLDLEEVTRILERNLKELERNLRDLDRTVKTNERLLRELLKKLRDIVRTILELLERKTK

SEQ ID NO: 13237 - protein, 238 aa, Artificial Sequence; identical to SEQ ID NO: 13236
  Synthetic

SEQ ID NO: 13238 - protein, 236 aa, Artificial Sequence
  Synthetic
SEKEDVRRKLEEDREKHERDLRRIEEELRRTIEESERRLKEVKKRLKELIDDVRRRDSDDRTLLEKIIRDVEKLVRELVEDNRRAIEKVKRLLEEIVKTHRDNIENVRRLLEEKGVPEEVREELRRIVEESERVVRRIEEELEKIVKDSEDAVREIEEDLERVLEKAKRLAEKLKDKEELKKAVETILEELVRIADKLIDIHREILEKLLRVAEKLLEVSRRALDKLKKLIDKTDK

SEQ ID NO: 13239 - protein, 236 aa, Artificial Sequence; identical to SEQ ID NO: 13238
  Synthetic

SEQ ID NO: 13240 - protein, 231 aa, Artificial Sequence
  Synthetic
DKAEVLREALKLLKDLLEELIKIHEESLKRILDLIDTLVKVHEDALRKLKELLERSGLDERELRKVERMATESLRTIRKLKEELRDLARRSLEKLREDLKRVDDTLRKVEEKVRRTGPSEELIEELIRTIEKLLKEIVRINEEVLKAVRELLKTLLKLSEDVVRRIEEILRKRNVPEEIDRELKRVVEELRRLHEEIKERLDDVARRSEEELRRIIKKLKEVVKEIRKKLK

SEQ ID NO: 13241 - protein, 231 aa, Artificial Sequence; identical to SEQ ID NO: 13240
  Synthetic

SEQ ID NO: 13242 - protein, 235 aa, Artificial Sequence
  Synthetic
REKEEIERTLEELKRILDELVKDDKKSLDRLREIMERSVRIAEETLRKLRETLELKARGEVDEDKLRELAKRLRDDLRRVSREHDEVRKRLKEEHDRLEKKIRDAERRLKTRLDELVKEKGRRIRELEEVLTEASRLLKEILDVNKEILDRAEELLRRNEKVIEEILRAVITLIRRDDDKDEVLKRLDDLIKEWRDVLEKLLRDLRELLERSKKRLRKVREDLKRLLEELERRAD

SEQ ID NO: 13243 - protein, 235 aa, Artificial Sequence; identical to SEQ ID NO: 13242
  Synthetic

SEQ ID NO: 13244 - protein, 236 aa, Artificial Sequence
  Synthetic
STREKAKKVLDTLRRDNEDMKRVVEKILRALKRTNERAEKLAREITEEIKRILKEVRVDRELLKEIEDTLKRVLEEIKRLLDESKKLLEDVEREIREILKTSEELLERIEREIETVNRDEKTLKEILKRLLELNEEMNRRLLKILRDLLRLNEEVIRRLLAVLERLLDALKEALDRGDVPEDLLRKLEEELRRIKEKLRKALEELEREHRELEKELDKLHDESRKEHERIEEELRR

SEQ ID NO: 13245 - protein, 236 aa, Artificial Sequence; identical to SEQ ID NO: 13244
  Synthetic

SEQ ID NO: 13246 - protein, 247 aa, Artificial Sequence
  Synthetic
DKERVLEDVKRRAKELEELLKEVEDRYEEDLRRIEETLKDTERRYREKLEKIKEELKRTVRRREVLEVIKELLKKLEDNIRELLDAIREALERLRRINKRILDILRRAIEEIKKILDEISRVDEKRELKKIKEEIDKLVDEIRRRLEELEKESEKVVKELEDKLRESVKRSEEIAKEVTDDLRRKNVDEKIKRIVEKIIKEHRDVLERLKRIIEEITRSDRESLERLKEILKELIRILKELADRERK

SEQ ID NO: 13247 - protein, 247 aa, Artificial Sequence; identical to SEQ ID NO: 13246
  Synthetic

SEQ ID NO: 13248 - protein, 242 aa, Artificial Sequence
  Synthetic
KSEDVVRELIKLHRELNDKARKVIETILERNRELVETAERVIRRLIKLLEDALRILKKSSTDEDEVRRAEELVRTLKEKAKRVLEEIRKLSKELEEKIRKVLEEINKLSEDLERKIEELTRKVRGEERLLEALTELLKDSIDILRTVLDLLRKLLETSLRILERVLELLKELLDDIREILRRLRLEEEELRRLEEEIRDIVRRLRKRVEEYRKELEDLEKELADEVKKYEDEVKRIREELRK

SEQ ID NO: 13249 - protein, 242 aa, Artificial Sequence; identical to SEQ ID NO: 13248
  Synthetic

SEQ ID NO: 13250 - protein, 234 aa, Artificial Sequence
  Synthetic
STEELLREIEEIIRRILEIADKTSKEWADLIKRILELIKRNLEELRKLVREVLEEVRKEGTSDRRVEEDLKRLLERYRRELEKLKEELKKVLDEHKKELKRLKDKLKRLLEELRKRVDDQDKTVLEEVLKEIADVVREITEVNKELARIIEELVKKIAKLSEEVLKTVEELIEELLEDKDTIDKLRKRLKEIKDRTKELLDRIREEIRELRERNKEIVKDIERRLRELKDRIRK

SEQ ID NO: 13251 - protein, 234 aa, Artificial Sequence; identical to SEQ ID NO: 13250
  Synthetic

SEQ ID NO: 13252 - protein, 243 aa, Artificial Sequence
  Synthetic
SKKELVREVVKELHELNKDVLRVLTEIVERVKELDKRVLEVLRRIVEEVERLAKEAGLDEDELRKLIEELRRLLKRIEDEVKRLNDELDKKLEELRKESEDLNRELEKTLRDDERKDSREDRVVRDIARILKTVLERNLRKIEEAARILMEYIERVKDLWRRAAELLKEILRRLLKLLKDKVTDKDRLREIEERVRKILEEIDKLLDDLRKAYDRILERIERLVRELSRKHKEVADKITELVK

SEQ ID NO: 13253 - protein, 243 aa, Artificial Sequence; identical to SEQ ID NO: 13252
  Synthetic

SEQ ID NO: 13254 - protein, 237 aa, Artificial Sequence
  Synthetic
SEDERVTRLKEELERLLDELRKRYEKLREEIRRVLEDLKKKYDELKEELDKMLRDLERRGKVSEEVLKVLRDVAARIEENLRRNLRLVAEIVRKLEELMKRNLDAIRELIEDVKRLLEIARRVKDERELKRIIEEIRKKIEKLLRESDKEVKDVDRDIKRALEESKKTNEKLLRDIERAGIDEELLRELERVSREDERLVKEAADELRRILDTDRKLLKEVVDTLERVLRRILKETR

SEQ ID NO: 13255 - protein, 237 aa, Artificial Sequence; identical to SEQ ID NO: 13254
  Synthetic

SEQ ID NO: 13256 - protein, 243 aa, Artificial Sequence
  Synthetic
SEEERVEELLRRIEKLLKESEEDVERLKKRHEEENRRLKEEVKRLMDELREILRRLEEETGEDRLVDILREIARRLEELLKRILELHDRSARILEELLERDLELLKEIVTEAKRVLEIIKRDGPTEEVKKELERLKKRVDEILKRSKDEVRKWKKAVEDAIRELRKLLKEVKDRVKELIERQRRDKDVDKLVEVLDRVLRRVRELLEELAETNRESIRRYERLSEKNAELVTEIIERLRRTVK

SEQ ID NO: 13257 - protein, 243 aa, Artificial Sequence; identical to SEQ ID NO: 13256
  Synthetic

SEQ ID NO: 13258 - protein, 247 aa, Artificial Sequence
  Synthetic
SKMEKLLKDLREALEKVKRRYEELERRLDEVLKEHEEIVKRLLEELEKVLKRIEEGGLPEEELEKLKKLAEKVKELLRELLRLSKELVDRVRELLKRDLDLVRRLVEIALKVLRERREQPNDEKRVEKIKRDLEKKARRVREENERIKRDLKRTADESRKRLEKLLEDLKRELDRLREDLDRARKDIDERVEELIERLIRIIERLLREVIKSHEKLVRTIERLIEESIRVNEELLEVIERLLDRARK

SEQ ID NO: 13259 - protein, 247 aa, Artificial Sequence; identical to SEQ ID NO: 13258
  Synthetic

SEQ ID NO: 13260 - protein, 243 aa, Artificial Sequence
  Synthetic
DLERVVEDIVDKAKRLLDKNLEVLKRIVDEVLRLLERLLRESRKVVKRVKEIIEELVRDEKELRRVKRALEEVLRRHEEIAKELKERLRKVAKEAEEKHKKLVEDLKRVVDEVRKKLSQPLDRKKVLEVLDELVTIIAKLLDENIKVLEEVIRVIAELLERLLDSHRRLIDIIAKLLEELRPEDKDLLTELEKKLRKLKRDSEKVVDDLKKELERIKREVKRLIEENRRTLKDIKRAVDEARK

SEQ ID NO: 13261 - protein, 243 aa, Artificial Sequence; identical to SEQ ID NO: 13260
  Synthetic

SEQ ID NO: 13262 - protein, 245 aa, Artificial Sequence
  Synthetic
DEDELVEEIERRLREIEKRLRDVMEESKRRLEEILRELKRIIDESRKRLDDLRRRLKDVSEEILRIVEEIIKINEDNLRNARRILEEIIRNNEDLLRKIEELLKEIIKIVRELLKLLKKDGTLDDRILKEVKERADRLRERLKRIEKKHKEDADKIREDLERDERKHEEDAKRIREELDRLRKDIDERIEKILEEILRLSRESLRKLKKILEELLKVSEDSLRDLIRILEDLLRLLKDLLEKLKK

SEQ ID NO: 13263 - protein, 245 aa, Artificial Sequence; identical to SEQ ID NO: 13262
  Synthetic

SEQ ID NO: 13264 - protein, 235 aa, Artificial Sequence
  Synthetic
SEDEELEDLKRKLRRALERYEDRLREIKRRLDEKLKEIKRDYDRLKKELDDLLREIERRGVKDELLERALELIKRLLDKSLRLIEEVLRELKRLLDTDLDILRRILEEVARLIDEVRSGSRPGEELVREIKKVLDKVKEDSERNVREIERVLEEVEKRSREIVREAEEVLKEVEDRIGRDEVVKELLDLVREIIKRLKEIHEEILRLIETVLEDLERANRRLLDLARKILEDARK

SEQ ID NO: 13265 - protein, 235 aa, Artificial Sequence; identical to SEQ ID NO: 13264
  Synthetic

SEQ ID NO: 13266 - protein, 242 aa, Artificial Sequence
  Synthetic
SKEEKLEDLIRRIKERLEEALRRNKKTADEIRKELKKATDRNRKRAKELRERLREVLRRTKEDKVIKELERVLEEVLRKLERSLEELRKLLDKILKKSEENAKEIKDVLDRILERLRKREEDEESMKRILEDLKRRLEEMAERSRKKIKDLEKEIEDILRRLEELHRKIKRELEELLKRITDETGPSEVVEELLRLLEELLEHNREVIEKLVDLIRELLRHDKEVTEEILRLIEELLKEVEK

SEQ ID NO: 13267 - protein, 242 aa, Artificial Sequence; identical to SEQ ID NO: 13266
  Synthetic

SEQ ID NO: 13268 - protein, 239 aa, Artificial Sequence
  Synthetic
SERELIERWLELHKEILRLIRELVERLLKLHREILDTIKKLIRELLELLEDIARKLNLDKEAKDELREIKKRVEDKLEKLERESRKVEEDLKRKLKELTDESDTVEKRVRDVVRRNTQRREEIAEELLRLDRKLLKAVEELLKEILDLNKKLLDDVRRILEETRRVLEKLLDRVRRRERTDDERRTLTELLKRMEDILEKVERTLKKLLDDSKRMAEEVKKTLKELLERSEKVAEDVRK

SEQ ID NO: 13269 - protein, 239 aa, Artificial Sequence; identical to SEQ ID NO: 13268
  Synthetic

SEQ ID NO: 13270 - protein, 233 aa, Artificial Sequence
  Synthetic
SEDELIRRIREELKRLEKEHEDMVRELEKKHKKLKEELDRAIEEIERRLRELKERVEREGNGLEVLKKVLDALRKLLEDLREILKRLVDANRELIKENHKILKKLVELLERLLKLLKDGVPREEIRKEIKKISDDIRRLHRDLERRSKKLDDDLKKELDEIKKRAEDLLRKLKEDGLDDELVKEIKRLLEELLRLLERLVRSSRRLNEELLRLSEKLIRDAERLARELLEAAR

SEQ ID NO: 13271 - protein, 233 aa, Artificial Sequence; identical to SEQ ID NO: 13270
  Synthetic

SEQ ID NO: 13272 - protein, 241 aa, Artificial Sequence
  Synthetic
KKEEDLRREVEEVKEEIRELIERSRESVRRILKEIKDLIRKSKESIDKILEDLKRKNLDETLIRAVEKLLRENLELLKKLLETVKELLERNEELLKRLVEEAERILEELLEVARRREDEKALERVVREVEKELKRLDDELKKALKDSEEELKRLEDELRRAKEENEKTLKKLRDDLRREGRDEEVLRVVEELLKLLKEHLEENVRILRRILELLRRHHDTNRKIVKRILELLRRVLESIRK

SEQ ID NO: 13273 - protein, 241 aa, Artificial Sequence; identical to SEQ ID NO: 13272
  Synthetic

SEQ ID NO: 13274 - protein, 241 aa, Artificial Sequence
  Synthetic
SVEEILRELLRVLEEILKRIADINEKLLRVSRKIVEDLKRLLDEALRVLRRAVEEIEKEGRDEKEKEKMRRVLEKLTKEVEDLKKKIEDVLRETEELSRRLKEELKDILRRLAKAVEDIERRRLDKEKVKKLLEDILREIERVIRESLRLAEEDVRKLEEIIKEILDLIERAIRIVEEEAGRDERLREILEELERVLEKVMRDLRRILREYEEVLKEAREEYRKILEELRKVLKEVDDRLR

SEQ ID NO: 13275 - protein, 241 aa, Artificial Sequence; identical to SEQ ID NO: 13274
  Synthetic

SEQ ID NO: 13276 - protein, 243 aa, Artificial Sequence
  Synthetic
SELEKIDRLLEKVLRENKRALDELVRLLEELIKTNRDALEKLREINERNIERLREEVKDVSERVKEELKRVAEESRRLIKKLKEDSEKTVRELRKLIEELRKRSKETIDRLRELIKRVREKGRRDKEAVKRLVDIHRRNLELLEDVVRKLLKLHEENLRLLEEAVRRILELDKKVLDKLRKDLDKKVLEDLERHLEESKKTVERLVRELRKTHRKVEEDVKRLIEELRRLHEELRKRLEDDDR

SEQ ID NO: 13277 - protein, 243 aa, Artificial Sequence; identical to SEQ ID NO: 13276
  Synthetic

SEQ ID NO: 13278 - protein, 243 aa, Artificial Sequence
  Synthetic
REKEELIKLIRDILEKLREHSRTIVELLETILRVVREHSKRIEKLLRELLDILRRQTLRDEELRKMLEDVERDIRESLKRLEELLRDIKRRIDESLRELEERLKELEKRIEELARRANKDITTAKRLLDVLKTLLKLNKESIERLLKVLEKLLKDDAESIKRLLDVIRELLKELKDVEEKRRPEKEVEDLLRKAVEDIEKLIRENEKLLEDVLRTIRKLIRENEELLRDIVEKIKRLADEARK

SEQ ID NO: 13279 - protein, 243 aa, Artificial Sequence; identical to SEQ ID NO: 13278
  Synthetic

SEQ ID NO: 13280 - protein, 247 aa, Artificial Sequence
  Synthetic
SEEEEVKKVVDEIKKVLDELRKANEDSARRLREVLEELRKRNEESKKEVKDLLEELKRVKRDEELRRVAETLLDVNRRNLEINVKVLRELIRISEDNLRINDEVAKRILDLVRELLKELEKAGLSREEIEKRLRDLEKKVKELKERATKLHKELDDALKETKKRVKKMHDDVRKKVKELRELSKDKDTDTKVKELIEIVDELLEIDDRILEEIERTVRKVIDLNRKVLEDIEELVKEAIKVLEEIAK

SEQ ID NO: 13281 - protein, 247 aa, Artificial Sequence; identical to SEQ ID NO: 13280
  Synthetic

SEQ ID NO: 13282 - protein, 233 aa, Artificial Sequence
  Synthetic
DEEEELRELKERIERTIEKLKEDTKKLKKELEDRIRELKRKTKELLDDMKRLIKEVKDKGDRDEALEELAKVSEDNLRINDEVLEELVELAKRLLKLNVDVLDELRRLVEEILKARKDGKDRSDLERVVKELREILDKLRKDNERVVKRLKEVLDELRRRNEESVRRLEEILRDRNLNEDIIRLVRDLIRLNREHLRDLEEAVREIIKLLREHLERLERVVDRMIRELRKAAK

SEQ ID NO: 13283 - protein, 233 aa, Artificial Sequence; identical to SEQ ID NO: 13282
  Synthetic

SEQ ID NO: 13284 - protein, 241 aa, Artificial Sequence
  Synthetic
SEEEELDKLRRELEELAKESTREVKELLRELREMLERHKKRLKEIKDKLDEDIKREDSKKDMVEEAVKVLRDILRRHKEVVEELAKVLEKIAEILERLHRRNLKLNREILKRLRDDPRGERLREELDRLVRRLEESNDEIRKALEDLVRELRELLKRIEDDHRELARRLEELLKRIIDRDGRTDELERLKDLLRTLIKKLEDLLENLRRLVERVIESLRRLVEKDEEINKRTIKELRRAIE

SEQ ID NO: 13285 - protein, 241 aa, Artificial Sequence; identical to SEQ ID NO: 13284
  Synthetic

SEQ ID NO: 13286 - protein, 243 aa, Artificial Sequence
  Synthetic
DEERIVDKILKVIRESAEALRKIVEDVLRVLEELMRRHKKNVEELDTIVEDLLRKVRERVDKDELERLKREKEKDRERVREIVDKYRKVLEELKERLERVLEDYRRKLKEVEKKVKEIRDRKDEKDEKTVVDEIRKLVEELLTLDRKVLEDLRRLAEEALRKDREVSELLRDLLRRIEEKLTSTRVEEEVLREARRRIREVERHNKKVHDDARKRLRDLVEELKRLHRELEEKLRRIIEEIDR

SEQ ID NO: 13287 - protein, 243 aa, Artificial Sequence; identical to SEQ ID NO: 13286
  Synthetic

SEQ ID NO: 13288 - protein, 242 aa, Artificial Sequence
  Synthetic
SEDEKVRKLLRDLAEEIKRLLETYDRKLKEIAKRIEDTLREYRERLEELKRRLEELVRKKNKDMTVIEEIDKLVRETLRRLEEIIDRILKLVKENAKLLEDIARRILDLIKKLLEILEEGRDRKEVRKAVEDVLRDVEKKLKDLLKHTEDSVTRVERLLKELKDRTKKILDDIKRRLDEEAKVEELVREIRRTLETILRLNEELLKRIRDVLREIIELNREVIERLREILERLADLIRRRAE

SEQ ID NO: 13289 - protein, 242 aa, Artificial Sequence; identical to SEQ ID NO: 13288
  Synthetic

SEQ ID NO: 13290 - protein, 245 aa, Artificial Sequence
  Synthetic
SELEKLARLLEEILELLRELHRKTAEALKEILELLDRHLDDLRRAVKEILEDLDKDLEDERRRELEEKVERVKETLKELLERLRKRNEDVKRELERILRENEKRLEDVKKTLEDVLRRLADLVRRGKGEEELKRVLEELLKLVKEVLDVNRRSVERLLELARRLIEENEKVLRELLELVRRVLEELLRDDDKAKKVREKLEELLRRLKEKNDDLRRKLERLARELEKLHEEVKKRLKELEDEARR

SEQ ID NO: 13291 - protein, 245 aa, Artificial Sequence; identical to SEQ ID NO: 13290
  Synthetic

SEQ ID NO: 13292 - protein, 245 aa, Artificial Sequence
  Synthetic
RELEKLAEVLERIVRALETHLKLIADVLREILRLLDEHLKIIKKVVRDILRELDEVLRRRDDETLERTLERMKRRLEEVLDRLEKENERVKKELRERLERLARENEEVIERLKKLLDELRKARENGKDESVLRRVLEEVLRLVKELIDRNREVLEELLKLAETLLRINTDVLRKLLELVEEILRRLVDDSDTLEKLRRRLEDRRRKLKEANDRVREVLDRLRKELEEIDKRLEDVLKKLREDLER

SEQ ID NO: 13293 - protein, 245 aa, Artificial Sequence; identical to SEQ ID NO: 13292
  Synthetic

SEQ ID NO: 13294 - protein, 241 aa, Artificial Sequence
  Synthetic
SKKELLEEVVRRAIELLKRHLEKLKRILEEIVRLLEEHLEKVERVLEAILRLLDDLLRRVTDERLIRTLEDVKRRLREILERLADENRKAIKRLRDLLDKLEKRNKEAIERLEEILEELKRVRRDEELLRVLETLLKIIEDILRENTKVLEDLLRLVEEILERNLRVVEELLRLAREILTEIVTDKDKLKEIEDELRRLLEELRRLDKKIKDRLRELKKDLDEANRRIKETLKKLLREVEK

SEQ ID NO: 13295 - protein, 241 aa, Artificial Sequence; identical to SEQ ID NO: 13294
  Synthetic

SEQ ID NO: 13296 - protein, 238 aa, Artificial Sequence
  Synthetic
SDLEELEKLIRRLLKINEDLIRIIEDLIRKSLTLLKRIVDLIRELIREIEEIIRRTNIPKELVDEAREKIKRILDEVERLLRELKKRHREILEELRKNLERVRRELKKILDRLRDLKRKNAREEEIRKLIEELLKVHKESLDSIRRLIEKLLRVHETALRRLAELIRRLLEVLKEVLDKVPVSEEIRKRVRDLEEKVKKLLRDLEEESRRVAEKVEEDLKRVEEESRRTAREVEEKER

SEQ ID NO: 13297 - protein, 238 aa, Artificial Sequence; identical to SEQ ID NO: 13296
  Synthetic

SEQ ID NO: 13298 - protein, 244 aa, Artificial Sequence
  Synthetic
SKEERADELLKDLERKVDKLRREHEELLKELKRKVDELRKEHKKLLDTLREEVRRIEEKVKEEEELRKVIRELLELLERNVKKNIDVIETLLRLLEDLVRVNVKVLKEIVDELKKIVEAIKRGEDRSEVDRAIKRLEDILEKLARENKRVMDELRKLLRTLREENKRSIRALEELLERLRRRVKSEDVLREITRLLEKAKRIIEESLREITELVKEIEKIIKESLDAARRLLEEIKKILEELAR

SEQ ID NO: 13299 - protein, 244 aa, Artificial Sequence; identical to SEQ ID NO: 13298
  Synthetic

SEQ ID NO: 13300 - protein, 241 aa, Artificial Sequence
  Synthetic
SIEELARKLVKENRRLATEANKILKDIVKTNRDSIRKVREILKELVERLRDLIRKVRRDGDDDERKLEEIVRELEKRLEEIKRKLDKVVKESEDLIKEIEDKIRELDKRSEDKLREIEERLKDSGRESVEKVLTELLKVHEDHLRELIKVLDELLRLNDESVRKLKELVEELLRVAEDVVRKIKVDEDLKRELERAKRELERLLRELDEEHERMKKKVKDEIRRLKKESEEVKKEVKDTED

SEQ ID NO: 13301 - protein, 241 aa, Artificial Sequence; identical to SEQ ID NO: 13300
  Synthetic

SEQ ID NO: 13302 - protein, 239 aa, Artificial Sequence
  Synthetic
DEEEITRKLEETIRRLEEEIDKIIKDLLRMLEENNKEIKKVIEKVLETSRRILSALARNVSEEELDRILKEYKELLDRLRERSEELKKEDERLVRDIRRTLKELLDRLKELVDRLIEERGRTKLVELIDKLLKVLEEALREIKRVIDELNTVNRDANRRILEVLDKNLELVKRIIDLAKERRTEEVLREAEKRIRDSAEEVKRILEEHKERLRELVKKLERVKETVRKKIEELREEAKR

SEQ ID NO: 13303 - protein, 239 aa, Artificial Sequence; identical to SEQ ID NO: 13302
  Synthetic

SEQ ID NO: 13304 - protein, 232 aa, Artificial Sequence
  Synthetic
SELEKDLKDAEEIIKELEEINKRLLEEIRRIVERITKINRDLLETVKRLIEELIKEDSVDEKVVREIEEELRRIKEESKKVEKDIRELLRRITKKSEEVAKRLRELLEELRRANKPKDDLLREILEVLETALRMLEESLKELRRVLEELLKASKRTLEKVKEVLKRLLEKARKGVDEERLKEIEERIRRTEEDVKRKHDDVRRELDEEDDRYKRELDKVRKKLKEKADRIRD

SEQ ID NO: 13305 - protein, 232 aa, Artificial Sequence; identical to SEQ ID NO: 13304
  Synthetic

SEQ ID NO: 13306 - protein, 232 aa, Artificial Sequence
  Synthetic
SKLEDLLRKVEEIIKEIERINEELLKRVAEIVETLLRENKKLLEEIKEILKRLIEDGSVDEEVVRKLEREVTEIEKKSKKVADDIRRKLRKLIEESREVVRDIKRKLEELKRANKPKDDLLRDILRVIKRLLERSAEIVKRVEDVLEELLKLLKETLDELLEVLKRVLDEVRKNVDERKLDKIRKDLERVVREYEEKLKEVRKRLRELVERVKEKHKRIEEELRKTAKEVRD

SEQ ID NO: 13307 - protein, 232 aa, Artificial Sequence; identical to SEQ ID NO: 13306
  Synthetic

SEQ ID NO: 13308 - protein, 242 aa, Artificial Sequence
  Synthetic
SSKELVEKLKELIKDHLRVADEVIKKLEELIRRHLRKVEEIARRLEELIRELADELRRAGIDEKELDKIRKEIEKVLRELKRLLEELRRDHERVLKELEREVKRLRDDHRRILKELDDLLRRGLDKKELLERVRELAERLNKLVEDILRRVEELLRELSKKVKELLKRVERLLREILKLIRDAGGDRRRLDRLEEKVEKDLRKLARELEDVNRRLEEELRRLEKRSEDLNRRIREEIKKDAK

SEQ ID NO: 13309 - protein, 242 aa, Artificial Sequence; identical to SEQ ID NO: 13308
  Synthetic

SEQ ID NO: 13310 - protein, 238 aa, Artificial Sequence
  Synthetic
KDDEILRKLLEILERLLKLSEEVLRELLRLLEELLRLSKESLKRLSRLLEEALKTLVEEEGREDETLERLERELRRVERKYKEDLDDILRKAKRLLEEAERLHREIRDRLRKAAEKKDEGDRDELIRRIIRLVRELTKINDELLKRVEDILRELAKLNEELIRTIKELLDRLVEKLVRRERLKAVVDRIEKAIKKVTEDSRRLVKRIETELRELVKRSKDLAREVEKRLKEVVEEAKR

SEQ ID NO: 13311 - protein, 238 aa, Artificial Sequence; identical to SEQ ID NO: 13310
  Synthetic

SEQ ID NO: 13312 - protein, 242 aa, Artificial Sequence
  Synthetic
SDLERILDKVTKLAEDAKKLAKKSVDLHRDNIRRLKTTLKRILESLRKAIKRLKDALRRGPRSERVDTLIRRIDKLIKELEDEVREIERRIDELSRRLEEKYKEVIKRIDKLVKDLRDLARRGVDRKDLVREILRILREIIETLRRLDEEVLKVNEEILDLIEELVRSILKVLEEILRLLVEETGPSEELEELKRDLDRLFEKIRTDLKRLRDTNRKLFDDLRKEHEAVEDKVRRVAEELTK

SEQ ID NO: 13313 - protein, 242 aa, Artificial Sequence; identical to SEQ ID NO: 13312
  Synthetic

SEQ ID NO: 13314 - protein, 232 aa, Artificial Sequence
  Synthetic
SEEDLVREVLRAIKRILELLTTLSKENLEVVKRIIEDLERVARENLRVIEEIIKKINVDEEMKKELDKELKRLEDEHRKAIRELEELLEEHKRRLEEIRRRVDKELEDIKRANLPIEDLLKVIDDVVRKLLRLVKEDLESLRRIVRKLEELLKKNLKLLRDVLRKLEDIARKKNVDERIIEEIRRTATEVLKRNEAVVKKIRELIKRVTERNRKVLEEIKELVKRIKDELRR

SEQ ID NO: 13315 - protein, 232 aa, Artificial Sequence; identical to SEQ ID NO: 13314
  Synthetic

SEQ ID NO: 13316 - protein, 237 aa, Artificial Sequence
  Synthetic
DKEREIDDIAEKLRRKYKKLREDLDRIEEELRERYERLKRKLDELARRLTKKARDENSDKKAVEELEKMIKELLDRLRKLIEDNLRVVEEIIKLIRELIDRDVEVVEELLDILKKVRTEEMVERIERRIEELLKETERLLKEVLDRAKKLHRDSEELVERVERRIKELTDEIKRLIEENKVDERLEELLKEVVETLRRLLEELKRLSEEVLKKAKEVIDRIRRLSEEVVKSLRDAAK

SEQ ID NO: 13317 - protein, 237 aa, Artificial Sequence; identical to SEQ ID NO: 13316
  Synthetic

SEQ ID NO: 13318 - protein, 242 aa, Artificial Sequence
  Synthetic
SEEEELDKLLKEYERVVREIEEKLDRVKRDIERLVEEITRDLRRVLEEYRKVVEELAKDEGDTSEILDTDMKIVEDLLRLLKEILDKILKLIEDALRVLKEVLKRDTDIVRRIIEILRRGVSEKDLKEILDRWEEENKKLLEEIKKILDKVRDDVRKLVEEVRKALEDWKRTLEDLLRKEGQESDTARRIERLSREVIKKLEKALKELEDLVREVLRRLKEAVEEIHKLSRDVIKMLTDATR

SEQ ID NO: 13319 - protein, 242 aa, Artificial Sequence; identical to SEQ ID NO: 13318
  Synthetic

SEQ ID NO: 13320 - protein, 246 aa, Artificial Sequence
  Synthetic
DDEERLKKVKEEIEEKAKRLKEDLERALKRYEDIIKKLEDDNRKVLERIRRKVEELKKNRVTSKDIEKALREIIEEIKRLNRENVKEIRRLNEEVKELLDRILRALEEIIREITDLLDKSVKDEEKLRKIKEKLEKVLREIEKDVRDLKRKHDELLKRVDDISRKIEEDLDRVAEKIRRILSKPVDDELIRKALEELLRIAEEILRRDLRLLEENRRVVKESLDVLAELLERLLELLERILREVRK

SEQ ID NO: 13321 - protein, 246 aa, Artificial Sequence; identical to SEQ ID NO: 13320
  Synthetic

SEQ ID NO: 13322 - protein, 234 aa, Artificial Sequence
  Synthetic
SERDVLRELLERIKKLLETLIRIVEELVRRSEETIKRLAELNRRLIEEIRRIVEEVKKDVEEEILRDVERLLKELADETEKILREVKKRLDDNLKRLEEIVRDVERLLKELKEEVDRGDKSKEELVREILKVAEEILRKIEELVKHHLDLNRDILRLFTESAEKLEEILREVLRKLRLDEEVKKRVEELRREYRETLKRLRDESEKIAEELKRLLDELRRRLEELARELRERTK

SEQ ID NO: 13323 - protein, 234 aa, Artificial Sequence; identical to SEQ ID NO: 13322
  Synthetic

SEQ ID NO: 13324 - protein, 235 aa, Artificial Sequence
  Synthetic
TEEEIIKEIVKLLRDLARLHEEVDRTNKRLLDELVRLHREVDERLTRLAEDLIRLAEKGASDDEIRELLKRIADELERLKKELEEINKRHRDEVERLKEELRRLNEEIKRRVEELKKDLREEAVRILEEILEMLRRISEKNLRVNDKIHETIERISRTNLKVLDDILRALEELAKAKLDRKDLRKVVEELRRRIEELNRRHDKLAEDLRREIEELNKEHKRMLRELEKKIEDDRR

SEQ ID NO: 13325 - protein, 235 aa, Artificial Sequence; identical to SEQ ID NO: 13324
  Synthetic

SEQ ID NO: 13326 - protein, 240 aa, Artificial Sequence
  Synthetic
DAEEILKEIHEIDKRTIDEIRKILKKLLEADKKSIDDIRRILKKLLEIVKRLIDLLRRVRRDEEVKEVVKEVERRLRELREEVKRVVKDSEDKVKRLREDMDRVVEESERLARELREKLKKKRVPEDVLRLVEEIIKLNREVLKEVRELLEDIVRVNREVLREARELLEELARTLRKLLRDRSDDKTLKKILDELRRKVKETDDRLRKLHEDLKRKVKELIDRLERLNEDIARLLKETRD

SEQ ID NO: 13327 - protein, 240 aa, Artificial Sequence; identical to SEQ ID NO: 13326
  Synthetic

SEQ ID NO: 13328 - protein, 236 aa, Artificial Sequence
  Synthetic
KTEELLRELIKVLKETLDRLKRVLEKLAETNDKSLKELLKLLEELLKAIRDVLRRILDDKDVMRDVERRLREILERLREEIDRYREELKRLLDEVKKTLDEYEKRVREVLEEIKKRGLTDELIRKLAKENEELVREIERIIKENRDANEELLRRALEILKRLLDLLKRVLEEVVARRGRRVDEVVEELEKVARELADKLRRVLKESEDVVKRVKDELREVLDRSKKVLEELKKKRK

SEQ ID NO: 13329 - protein, 236 aa, Artificial Sequence; identical to SEQ ID NO: 13328
  Synthetic

SEQ ID NO: 13330 - protein, 241 aa, Artificial Sequence
  Synthetic
SKEELVKEIDELNKRVNDLLEELLRKSEKLHKEILELLERLLREIIKLLRRILEIVERRLEDETLKRVLEKLEETLRRLKKKVDEELKRLEDENRRLKEEMDRLLRKSREELERLREKVVRDRGREDEVLRRLLELHTEDLKHAREVLDEVLRLNKKALDLIRRILTEVLKLIKELLKLIEAGADEDELRRLLEDIERKIERLLRELKKESEEIRKRIRELLEDNRDKSRKIKKAIEELKK

SEQ ID NO: 13331 - protein, 241 aa, Artificial Sequence; identical to SEQ ID NO: 13330
  Synthetic

SEQ ID NO: 13332 - protein, 235 aa, Artificial Sequence
  Synthetic
KLEDAARIAAKAAEEWAEAHKRAAKINAEASEEWAKAHREAAKIAAEAAKRAADEARGDKDEDAKRAEDLARRAIEILEESAKRAKDAAEDDKRIAKESAERAERLARKAKELLKDLAKKKASADDAARLAKRVAEEAKRLDKEAADLSRDSARRAKELDKRALKLVRDAAREAKKAVDDEDALRVIEKAAEDAERAAKESLDVAERALRESEKAAKESLEVLERALRDAKRAAD

SEQ ID NO: 13333 - protein, 235 aa, Artificial Sequence; identical to SEQ ID NO: 13332
  Synthetic

SEQ ID NO: 13334 - protein, 242 aa, Artificial Sequence
  Synthetic
SALETAAKLAKEAADRWLEASKRAAELAKDAADKWLDASRRAAELAKKAAKEALDADKEDALERAARSLEEAAKEAIKLDEEAARRLAEAAKTAIKLDEDAARDLKRAADEAKRRLTEDRDAAREAEKLAKRAADAAKRHTDELRKLAERALRASKEHTEDLKKLADDALKAAEELKRLDDRDTDLKRRAAKAAEDIKKAADELLKKSEDAAREIKEAADKLLEDSKRAAEEIKRAADEITR

SEQ ID NO: 13335 - protein, 242 aa, Artificial Sequence; identical to SEQ ID NO: 13334
  Synthetic

SEQ ID NO: 13336 - protein, 238 aa, Artificial Sequence
  Synthetic
DEAEKLAKEAREAIKRYADASEKIAKEAREAIKKYLEASKRIAKELREALKELARRLTDRRALEAAKKAAKVVDDAAKKNEDAARRAAEVIDKAAEDNRRAAEEAARVIDEAADRARRISDKDTAAEVAARAAREAARIIEEASRISAEAAEEAAKILEDASRIAAEAAKRAADIAREALRDKDAVREADEAAERAREKLERLSREAKKAAKDAKDKLKRLSDEAKKVARRLIEELKR

SEQ ID NO: 13337 - protein, 238 aa, Artificial Sequence; identical to SEQ ID NO: 13336
  Synthetic

SEQ ID NO: 13338 - protein, 232 aa, Artificial Sequence
  Synthetic
SKDEKAIEALKRAADETRKAAEKSADAARRAAEKSEKAAREAAEALKRAVEEAARALGEENEAAREAKKAAEEAAKTIKEALERSKKAAKELIEENRKIAKRSERAARELARLLREKKEDSKEIVKKAEKAAKELEELWRRTSEEARRAAEELEKIWRELLKRLRDAAREAARRGVPEAVLRAAEKAIKAAEEAARANKKAADEAIRANEEAAEANKRAADKAIKAIRDAAR

SEQ ID NO: 13339 - protein, 232 aa, Artificial Sequence; identical to SEQ ID NO: 13338
  Synthetic

SEQ ID NO: 13340 - protein, 233 aa, Artificial Sequence
  Synthetic
DREDAARRVEKAAREIAEKNKKAARDIKELAKEAIKRTKEAAERVKRAAKRIAEAAEEGADEKTLLEEAKELAERAKRASEDLARKWEKIARDALRALEESARDVRRLAKEAKDALRRDGGIREAAEAIDRAVRKAEKTHKEAAEAIKRALEDARKANEDAARAIDDALRKLAEARDKDAVKRALEELARAAEEAARADAEAAKKLAEAAERAARANIKALRDLAKAAKDAAR

SEQ ID NO: 13341 - protein, 233 aa, Artificial Sequence; identical to SEQ ID NO: 13340
  Synthetic

SEQ ID NO: 13342 - protein, 245 aa, Artificial Sequence
  Synthetic
REEEAAREAAEAARRAAEIAIKANEEAARAAKRAAEISIKASEDAARAAEEAAKEAARSNDKNERAKKAADEVKREAERLAKENRDIARRVEEEARRILDESRRIAEEVKRRAEEILKLLRNGEPLEELAKRLIEILKRALEEDHRLARRAIDILRRALERNARLAREAIEILKKALEDAAREAQDEDALRRAKKAIEDAIKVLKEALDKSAKAIEEAIRVAKEANERSAKAIKDAIEVAERAAR

SEQ ID NO: 13343 - protein, 245 aa, Artificial Sequence; identical to SEQ ID NO: 13342
  Synthetic

SEQ ID NO: 13344 - protein, 243 aa, Artificial Sequence
  Synthetic
SEAETLVERLKRLSERDERAARRLVEELKRLAEEDKRAAEELARRLEELARRAEDVARANKDRDEAKKVVEDLEKEAEEIIRDYRRLLEELDREAEKVIEDYRRILDKLRRDAERVIEDAKRRLKDLEEAARAIKLAREAAKRAIDASKESADAAERAAKEAIKASKRSAELAEEAAREAIKALKDAAEEAAKRLRRAAEEALKINKRANEELERAAREALDLNRRANEDLEKAAEDALRTAK

SEQ ID NO: 13345 - protein, 243 aa, Artificial Sequence; identical to SEQ ID NO: 13344
  Synthetic

SEQ ID NO: 13346 - protein, 243 aa, Artificial Sequence
  Synthetic
REAEELVKRLKELAEKDRRAAKRLVEEAEKIIRRARELSKKTVKKLEDLIERAKRLADANKDRDEAKKAVEDLDKEAKEIADEHRKATDKIERDARELIKKYREILKRLEEEAKRVIDDARRRLKELEEAARAIELAEKAAREAIEASRRSAELLREAAEKAIRADREAAKLAEKAAKDLIRALKDAAEDAARRAEEAARRALKINEDAAREAERAAREALKINDEANKRLEEAARRALETAR

SEQ ID NO: 13347 - protein, 243 aa, Artificial Sequence; identical to SEQ ID NO: 13346
  Synthetic

SEQ ID NO: 13348 - protein, 240 aa, Artificial Sequence
  Synthetic
KELEEILKTVEDLVRRAKELLRRIHEINRESIEDIRRLLKEIHDTNKRSIEKVDELLKRKTSEETLERLVEEHKKLLEDLLRRLRRLVEEHEKKLDKLRKTIEKLVREVEELLRRAAERVDDERARRVLKEVLRVIREVVEILKRALELSLEVLRDVVRRIEEALRLSLEVLKRVVEVAKNKRDETEIRKILKESNDRLTEVIKEVEKVLRESDELLRDALKKIVDVLREVLKRLEDTVR

SEQ ID NO: 13349 - protein, 240 aa, Artificial Sequence; identical to SEQ ID NO: 13348
  Synthetic

SEQ ID NO: 13350 - protein, 247 aa, Artificial Sequence
  Synthetic
EKEKEIKDAEDEARKAAEESKRKIDKADEDAKKALEELERSIREADKDAKRALDEERREDRRAEEAIKKLRDLARRAKKIHRDNLEKIDEIARRLKKLIKEYIEKSEKIARELKKLIEDAARKERGSDALRLAKEALDLVDEAARRNEKAAREALETVDRAARRAKEAIKKSAEDVDRAAREAEKLARERREDAARIAAKAAKDALKANEEAARILARAAKEALKILEDATRILKEAADRALDILRK

SEQ ID NO: 13351 - protein, 247 aa, Artificial Sequence; identical to SEQ ID NO: 13350
  Synthetic

SEQ ID NO: 13352 - protein, 246 aa, Artificial Sequence
  Synthetic
SEVEEIEKVARRNLELIKRLLEKAERVAKKSLDLIKKAADDARRIAEETLKLIREAAEAGVEEKAAREALRAIEEAARRAEEAAKEALKANKEAADRAREAAKRALDATRKALEEARRLAKDRAEEAAEALARALKRTIEAAKEAVEALARAAKRSADAADRAVEALARALEEAIRAAKEASRTKEAEDLLREAAKRAEELIRRAEEAAKRLKEEWERLIRELKRALEEYAKEAKKLIKELEDRTR

SEQ ID NO: 13353 - protein, 246 aa, Artificial Sequence; identical to SEQ ID NO: 13352
  Synthetic

SEQ ID NO: 13354 - protein, 245 aa, Artificial Sequence
  Synthetic
SKREEAEKAARRAEKLAREAREAARRSLERAKDLARRHEKLSRELLEEAKRLAEEVKETAKKPTDERTAEELARKIIEALKKANEENRRSAEELIEALERNLREIEKLIRDAIEALRRAVEEARGEGKRKADELRRAAREAIEALKRALEEARKAHEEAIRAIEEALKKDSKAAKEAIDAVDEAAKRKAIDEALKALKRAADLSADANRRALEALEKAARLSARAAEEALEALRRAAELARRAAE

SEQ ID NO: 13355 - protein, 245 aa, Artificial Sequence; identical to SEQ ID NO: 13354
  Synthetic

SEQ ID NO: 13356 - protein, 237 aa, Artificial Sequence
  Synthetic
SAEDIIRESEKADKDALDEWRRLIKKLEDLIEELLKENERLIRKLEELIKKALEADKEERGSEEAKRLLEKLARAIEELEKEARDLNRRAAEAIKRLADEAKKIVEEYKKIIEEIKKKASDARDLARALDRSAEAHERAAEIAARAAKRALEAHSEAIKIAIRAAKEALDAARAAKRGEARGEEAAERAKRAADEAKKASDEAAKEAREAAERALRAAEEAAKEAEKANRDALRSAK

SEQ ID NO: 13357 - protein, 237 aa, Artificial Sequence; identical to SEQ ID NO: 13356
  Synthetic

SEQ ID NO: 13358 - protein, 251 aa, Artificial Sequence
  Synthetic
SEDEELAKEAKRAVEEAKKRLEDLLRRAEEAHRRAKKELDELARRAEEAHKKAKRDIDRDAKDDEAARALKEALDRHLEAVKKAAKALKEALDRNLDAVREAVEAAKKALDDALKAIEDASRRDRKEDAKRAAEEAAKALEEAAERAERAAEKATRALEEALKRAREASKEAAKALKEALKRARESNVEEEIVRRADELAKRAEELNRRLAEEADKIAKKAKDLNERLLREARDIARRAKELIKRLLDARR

SEQ ID NO: 13359 - protein, 251 aa, Artificial Sequence; identical to SEQ ID NO: 13358
  Synthetic

SEQ ID NO: 13360 - protein, 241 aa, Artificial Sequence
  Synthetic
SKAERVVDEARKTDEEVLREAEKVNRKVEEVIRRVLKRNEDVNREIARAIERVLRGGVEEKLVRELEKLNRDHHEKSKENIRNLEEVNKKHHEELKELADRNRRLNDKVLEDAKRDRREEEVRKLLEELKERSRDSIRKSRELLDRLREYLKRDIDRSEKVLRELEKRLRELIEKVRRKVDKEEVLRTAEEVVREALRLVTDAHRVNEEVIRDVLRLVERVHRVYEEVNRRNDELLKELTD

SEQ ID NO: 13361 - protein, 241 aa, Artificial Sequence; identical to SEQ ID NO: 13360
  Synthetic

SEQ ID NO: 13362 - protein, 232 aa, Artificial Sequence
  Synthetic
KDEERLREILKKYKEDSERILREVREILERYRRAIEEILKRLEDILRKLEEDVRRELKDNEAVKRVVEKALEAVKEVLKAIEDAVRESLKAAEDVLREIKRVSDAIIRVLEALARGERDVDEVLETARRLTEEVEKVVREVLERSERALRKVRTVVKRVLDIIRELLAEVKRAVPDLTKALKTVRDVLELLRKILEEVRRLNEKLLEELKRLLDEVVEKNERLIKLLEKDAE

SEQ ID NO: 13363 - protein, 232 aa, Artificial Sequence; identical to SEQ ID NO: 13362
  Synthetic

SEQ ID NO: 13364 - protein, 240 aa, Artificial Sequence
  Synthetic
DELETLEDVLRKIEDLLRRWLEKLEETLKRIIRLLETSLKLLEESIRRILRILERDVDDDKVVRKLEEVLRRALKEHRRVLEELLKVLRDVLEENRKVVEDLKRVLEEVIEKIARVKRREELLRVVEELLERVREVIKELLRVNDRVLREVEEVVKKLLKVNDELAKRVRTVVKELVDSREDKKVRDVLREIEELLERHKRLLEKLARELRELAKRHREEIKKVLETLKKLAEELTRRVR

SEQ ID NO: 13365 - protein, 240 aa, Artificial Sequence; identical to SEQ ID NO: 13364
  Synthetic

SEQ ID NO: 13366 - protein, 235 aa, Artificial Sequence
  Synthetic
SEKEELRRELEEHAKRSRDTVKRLEDENRRVLESLKRKVDTLRRINEETLREIRRLAREERLSKDVVRRVEEVVKESEDILRRILRRIKEIADESERILREVLKKSEEIIREVERVLREVDSEELLRRLREALKRNIEVLRELLELNKEVLDRLVEVIKELLERNERVLEKLVRETDSRDEKLKRDLEDLKRKHDELRKRLKEELDELRRKHEKIKEELDRHLKELEDKLREARR

SEQ ID NO: 13367 - protein, 235 aa, Artificial Sequence; identical to SEQ ID NO: 13366
  Synthetic

SEQ ID NO: 13368 - protein, 235 aa, Artificial Sequence
  Synthetic
SEKEKLTEILRRHERESERVVKELDEENKRHLKKSREIADTLRKLNEETLERIRELVKRARISEELVEKVERVAEKSKRILDEAVKRSEDIARESEEILRRARERSERIIREIRRVLREVDSDDLLRLLEELLRRNVEVLEDLLRRNLEVLRKNVRVLRELLKKNERVLEELVKTLNDTDETLKRELERLKEEHERLKEELDRHLKALEEKHREIRREIDEHLKELKRRLDEERR

SEQ ID NO: 13369 - protein, 235 aa, Artificial Sequence; identical to SEQ ID NO: 13368
  Synthetic

SEQ ID NO: 13370 - protein, 252 aa, Artificial Sequence
  Synthetic
SEKEKLIEDLRRILKETEERLKRVKERLRELLDEYRRRSEDKLRELKKELEEEEEKIRRSGLSEEAERAVRKLLKVLREVLDKLKKLNEDNLRVLEEVLRLLERLLDELLKVLRELLRELEKLAEDKQDKDEVLEDIKRRIAEVIDRAKKLLDKLRELIEESIKRVRTETDRLRKDIEKVLRDIAEDVKDDRLRKRIKETADRLREMLKRHRELLERSMELLRRALEEAKKVLDETEETARRLLKLAEDEER

SEQ ID NO: 13371 - protein, 252 aa, Artificial Sequence; identical to SEQ ID NO: 13370
  Synthetic

SEQ ID NO: 13372 - protein, 246 aa, Artificial Sequence
  Synthetic
KEIEETLKELEDLNREMVETNRRVLEETRRLNKETVDRVKATLDELRKMLKKLVDDVRKEPTSEELKRLLRELEELLRRVVRRVEELLKKSTDLLERAVKDSKDALRRSHEVLKEVAKRVKRAKDENLPREEVLRLLRELLERHAKVLKDIVRVSEKLLREHLKVLREIVEVLEELLERILKVILDTTGRDKKVEELEKALEEIKRRLKEVIDRYEDELRKLRKEYKEKIDKYERKLEEIERRERT

SEQ ID NO: 13373 - protein, 246 aa, Artificial Sequence; identical to SEQ ID NO: 13372
  Synthetic

SEQ ID NO: 13374 - protein, 237 aa, Artificial Sequence
  Synthetic
SEEEDREREYEERHKKAEEDLRRAEEEYARELRREEERLKEEAKRLEKELRDARTKLDEDEIADKIAKALREIAELLKRLVKVIRDVLRENEKLLRDIAEVLRRISRENAKLLRDAREKQRAGEIVEALRESNKRILDALREVVKALKKTNEDVLRTVKEVVKRIEELLRRLASEGNDEKAKKALDEAVKRVKEDIKRLEDSVKTADDKDRKAIRRAEETVRTHIRTNEEAVRREEK

SEQ ID NO: 13375 - protein, 237 aa, Artificial Sequence; identical to SEQ ID NO: 13374
  Synthetic

SEQ ID NO: 13376 - protein, 235 aa, Artificial Sequence
  Synthetic
SELEETLKRLKETNKRLLKKVKELVDESLRLNEELLRRLREVIRKIKETIKEVLEEGVDEKDIRKAEEILDDVLRKLEKLVRDSVRVNETVLKEVEDIIRRSLTELDKVAERLKEAKSEKVVKDVLKEVIDRNEEIVEELLERIRRVLEDDLRIVKEILDILRKVLKEILKVLEEIVDEDERVDELRKRIRKTEEEIEDIKRRYEKRVRELKETLDRIVKELRDRYKKIREEIDT

SEQ ID NO: 13377 - protein, 235 aa, Artificial Sequence; identical to SEQ ID NO: 13376
  Synthetic

SEQ ID NO: 13378 - protein, 239 aa, Artificial Sequence
  Synthetic
DIEDVLKKVLEKNLRVLREVHEVNKRVLDEIVKLLRELHRVNKRVLEIILRLLEALRRGERDREEVLRELERVVKESKEVNKEVLKRLEDIVRESLREIERVLDETRKAIKEVEKVLRERRVEERVLEMLRRYADRSRDFADKDKKKNKETLDELRKLSEDDKRINDRLVETLRRIIAQGDTSDEDLKRIEDELRRTLEEHRKRLREVERELEKKVEEHERELRKYEEETKRLLREAER

SEQ ID NO: 13379 - protein, 239 aa, Artificial Sequence; identical to SEQ ID NO: 13378
  Synthetic

SEQ ID NO: 13380 - protein, 236 aa, Artificial Sequence
  Synthetic
REEERLRELITDYKRKLDDLKRRSEDLLREYEKTLEDIRRESERTKKELRESLKRDLDREGESEKVKVLKEVEDLLDKVNKRLLEIIKTNLDLLRRVNEELERVLKTNLDLIRKVLELARRGAPEKDVKRVADEVSERAEKLLRDVEKRNREVSKRLEDLLREIKERNDEVVERVKERTDDEKVKRELEKHTKLLKEILDTVRDLNRKHSEEIRRTVEEVRKANRRLLEELKETRK

SEQ ID NO: 13381 - protein, 236 aa, Artificial Sequence; identical to SEQ ID NO: 13380
  Synthetic

SEQ ID NO: 13382 - protein, 241 aa, Artificial Sequence
  Synthetic
SELEETLKKIKELAEISRKLADETRREIKKLIDDSRKLLEDTHRTNEEMVRRVETKAKDKDERIKEVLKRVAKEIKDSNDELRRRVEESAKRLREVLEELKEKIERSIKRLEDILDLLRRGEVREEEVVRELLKVLADNLRAIEEVLRKLLRILEDNLRVTEEVLRTNLRLLKKLLDELKLDEEKLREVRELLERYREDVRRLKKEYEELLREEDKKVKKKKEDYERILRKTKKELDERRK

SEQ ID NO: 13383 - protein, 241 aa, Artificial Sequence; identical to SEQ ID NO: 13382
  Synthetic

SEQ ID NO: 13384 - protein, 234 aa, Artificial Sequence
  Synthetic
SEDEKAAEDLKKLAEESIRELEKALRDAARLHEEALKRLKKALDEAARLAERAIEEARKGLDLRRVADEVAKAAEKAARAIEEVLREVLRASNEAAKAWKRVAKRNAEAAEEAARRRRDKTAEDLLREARKAAEDSKKEADDLNREAEELARRAREEAERLLREAEKAARDAKTKKLVGEELIKLIEDLLRLAAELAKKIAELAERHLRLLEEAARKHIELVERLIELAKRDTD

SEQ ID NO: 13385 - protein, 234 aa, Artificial Sequence; identical to SEQ ID NO: 13384
  Synthetic

SEQ ID NO: 13386 - protein, 234 aa, Artificial Sequence
  Synthetic
SEDEELEKLLEEAKKLIEESSRRLDELLEEDRRVVKRIEEEVEKLLKEVKEEIDKIKKEVRELEKIKRVLDALVDVARKIVEVTKELLRDNVRVAERIVEVIKDVNRKLVDVVDKLRKTKDKRELEEILRELERENRRVSKEVEDLLRELRKRNEDVLRRIEKLLRELKKEVDELLKDLGKVLEIVKEIIDRIRKLLKKTFDISDELLRKWEDLLRRNNDLSRRLLKEAEDKAR

SEQ ID NO: 13387 - protein, 234 aa, Artificial Sequence; identical to SEQ ID NO: 13386
  Synthetic

SEQ ID NO: 13388 - protein, 235 aa, Artificial Sequence
  Synthetic
SEKEDLARKLRKLVEELTREYEELVKKLERLIEEIEKVSEESVRKLEKLLREISEEVRKLGTDSRVLKRLLERLRRIIEEDHELNTELLKRLLDLLKEILDTSRELLKRLLDILREVVRDESVLRDLERTLREVLEENERAIEEAERVLRKVLEDSERAVRDARRVLKEVDKSPTKDELLRKLVELLVEVLRRLIRVNRELVKLLREVLERLLRILRESVKKLKRLIEKVIKDET

SEQ ID NO: 13389 - protein, 235 aa, Artificial Sequence; identical to SEQ ID NO: 13388
  Synthetic

SEQ ID NO: 13390 - protein, 242 aa, Artificial Sequence
  Synthetic
KEEEDLLERVKRVLDELIEIVDRNHELNRRVVETSARLVERLLEEVERALETLEREIPNRKLLDKAIKDLRDVLRRVKEKVKRSIEELKEVLEESRRVLEEVVRKLREVIDRVRRLVEKGVDLRDLIRELKRVLEEAVKLIERLVRLNTRAAEKDNESLRELVRAIKEALKRAVDMVRADGLDSRLVKKLDEIVKEVAKKLEDVVRRNEELWRKLVELNKESVRRLREIVERVARDLEETAR

SEQ ID NO: 13391 - protein, 242 aa, Artificial Sequence; identical to SEQ ID NO: 13390
  Synthetic

SEQ ID NO: 13392 - protein, 232 aa, Artificial Sequence
  Synthetic
RRTEEVIKKIAKLIDELIETLKKIVEDSAKLIKELIDLLEEIIKRSADLIRELEKVSKRGDRDRLKKLIDRMRRETERALEELRRVIEELKERTERALKTIEDLIREIEEAIRRELEDEDLAREILEVIRRILELLREDMELNLRALEEILRLLEEVIKLNKDAIDEILELLKKSEERRIAERIRELLRESKKLVRDVVEEAKRLLKENRDSTRKIIEDIRRLLRKIEDSTR

SEQ ID NO: 13393 - protein, 232 aa, Artificial Sequence; identical to SEQ ID NO: 13392
  Synthetic

SEQ ID NO: 13394 - protein, 242 aa, Artificial Sequence
  Synthetic
DKEDIIRRLARVLERHDEANREVVKEHDEVLEEHLDVHRRVVRSNIEVLRTLLELVEKLDSEDLKRVLDEVRKRLEKSLEELERRLRESDKKSETVIRKNEKAVRESAEALKDVIRKLKEARDDEKVKETAKKVRELLERLIELNRRWVEALRRLNERLNKLNRDAIELSRRLLKELEDLTREGVPEKDIRKVIEDIERLHRESMEEVRKLVEEIKRLNKEVLKRSEELVEEAKRLLKEVAD

SEQ ID NO: 13395 - protein, 242 aa, Artificial Sequence; identical to SEQ ID NO: 13394
  Synthetic

SEQ ID NO: 13396 - protein, 247 aa, Artificial Sequence
  Synthetic
DTKEVIEKLIRVLERAVKLLRELVDRDNRSLKKAVDLHREVVRKIIEVLEEAVRLLATVKEDEKLKRVLEEVVKELERVLKESEELVRTVIRDNREVVKDARELVREVERELKKVIDDARRRTDDEELRKLLEEIKKVLDDLRKLLDTNIKISEKVLRDWERLNRELAKILKDVIRKLEELARKMRDEEKLLREVERLVRELAKRLRESLKTVEDLVRELADTNRRSVKTVEDIVRDLERKAREVTR

SEQ ID NO: 13397 - protein, 247 aa, Artificial Sequence; identical to SEQ ID NO: 13396
  Synthetic

SEQ ID NO: 13398 - protein, 248 aa, Artificial Sequence
  Synthetic
SKRELLERVIREAERVLKEWEDLLRELTETSDRVIRDVERLLRELLRKAEEVIKDILRKSDDEELRKLLKRVRELLKELADILKRLVDEHRRLVEENIRIVRTAIELVKELLKRLADLLESGLPREDLTREVEKVLRELEEIVKKVKRDSERIVEDNRRLSEELRRLVEEILERLRRLVDDLIKKKDKDEDLKRVLERLTRVAEEILELLEEVLKKSNRSLEKAVEANAEALDRLIEVLRELLDDLRK

SEQ ID NO: 13399 - protein, 248 aa, Artificial Sequence; identical to SEQ ID NO: 13398
  Synthetic

SEQ ID NO: 13400 - protein, 248 aa, Artificial Sequence
  Synthetic
SKEELLKKVEDEARKVLEEWKEEVKRLIEESKRVLDDWRRLVDEVSKDIKRVIDEARKDSEDKDLEEVADRVRKLLEDNKRIVDEAIRRHEELLDENRKIVERVIELLEELLDEIAKLTRSGKPEEELIRRAEELVRRLAEIVERVIRESRRIVEDNRRISREVVERSKEIVDRLRKIVTELIKKKDKDEDLKRVLEKLIKVIEKIVRLNEEALRKSNESLERIVKLNEEALRELIRVIERLVELVRK

SEQ ID NO: 13401 - protein, 248 aa, Artificial Sequence; identical to SEQ ID NO: 13400
  Synthetic

SEQ ID NO: 13402 - protein, 230 aa, Artificial Sequence
  Synthetic
KEREEIDELVKELEKELRRLVRENEKLVEDNERTLKRLLEENKRLVEELVKRLRDGLDRDELKKVLDDALDANRKSVRRLEESAEEVLKTNRRSLERAIDLLRRALEEIADKVDKRDLLEEIERLIRELIRRLERVHEEIERLIRRSIEELRRIHEEVEKLIEDVKRVADRVDKDEVVEIVIRVLEEILRLSEEALRIHIRVTREVLRLSKELIDEIRKVLREIADRIRK

SEQ ID NO: 13403 - protein, 230 aa, Artificial Sequence; identical to SEQ ID NO: 13402
  Synthetic

SEQ ID NO: 13404 - protein, 245 aa, Artificial Sequence
  Synthetic
SKEELLKELLDRVRRVLTEIKKLLERLLRRSKEVIDDSERLVREVLKRVEDLAREIKAERSVDDRAVDRMLELVERWVELWKRVLELLEEISRRIVRLIERVLELLLKVVEEVLKRLTEVRTEKELKDVLDTVEELLKRVLDELRKVVEEIRELHREVLEANEEVMDRVEKLLKEVRDTLRRRLKDKDALDKLRRLIDELARLLREVHERDKELIRDHLREVEEIAKEIARLIKRLAEEIREITT

SEQ ID NO: 13405 - protein, 245 aa, Artificial Sequence; identical to SEQ ID NO: 13404
  Synthetic

SEQ ID NO: 13406 - protein, 245 aa, Artificial Sequence
  Synthetic
SERELAKRALERAKEAAEESKRLAKELLDRSRELAKRSKELADEVLKRAKKAAEEIKKKRSADDRAAEEALRAAAEWARLWKEVAELLLEASRRAAELWKEVAEEALRAAEEVARLLEEARTEEELKKAAEDAERLAREVLKANEDALREARRLHREVLEANDRAAEEARRLAEEVRRELDKRAEDKDAAREARKLLKDLLELAERAHKKDRDAIEEHLRLAEEASKRDKELLKELLDLIREIAR

SEQ ID NO: 13407 - protein, 245 aa, Artificial Sequence; identical to SEQ ID NO: 13406
  Synthetic

SEQ ID NO: 13408 - protein, 231 aa, Artificial Sequence
  Synthetic
SKEEEVEKVLRKWEEILRRLIEENKRANDKIRREYEELVKEIRRVLEEIKEVAERLRVSEEVKRILEKLIKLLEDILEYEKENVERLIELNERILRELKKSVEELKKLVTRVRRDKLPESEVRKLVEDVLRKNEELLKEAKKAWRDSIENLKRVLEEVKKLVKTVLREIEEKIDDKDVVRKLIEVIERLLRVAEEVIRRILKVNTELMRVDERSIRESLKAIREVLKVLDT

SEQ ID NO: 13409 - protein, 231 aa, Artificial Sequence; identical to SEQ ID NO: 13408
  Synthetic

SEQ ID NO: 13410 - protein, 245 aa, Artificial Sequence
  Synthetic
SKEELVDTVKKKLEEVLKKIDKLSRDVKEKLRRVIEELRKLSREVHETNREVARRLREEAALEEIVKLLEESAKRATKLLRDVVRRIKEVAKEASELLEELVREIARVLDEVVKLLAEAGVPEELVRDLERLVREAVRELERLVEEHKRLVEEAAKRLEKLVEEHKKISEDVARRLRELLEKISDEETVLRTLEKIIRDHNKAHKRVTDAVAKILEELIKLHDEVSRRLKDILRRLLELLDEVTR

SEQ ID NO: 13411 - protein, 245 aa, Artificial Sequence; identical to SEQ ID NO: 13410
  Synthetic

SEQ ID NO: 13412 - protein, 245 aa, Artificial Sequence
  Synthetic
RKEELVDTVKKDLERVIETVRKLSEDVKEKIRRVLEDIDRLSKEVHETNKRVVEELEDKKSLEEIVKLLEESAKRASRLLKELVRELKEVLKEASDLLREIVERVERVLKKIVDLLRESGTPEELVRTLEELVRRVVERLKKLVDDHEKLVKEIAEKLEKLVEEHERISRRVVEELRELLRKISDEETVLRELVKLIRDHNRMHEEVVRRLKKIIEEALKLHDEVSRRVAELLREVIELLDRVAK

SEQ ID NO: 13413 - protein, 245 aa, Artificial Sequence; identical to SEQ ID NO: 13412
  Synthetic

SEQ ID NO: 13414 - protein, 245 aa, Artificial Sequence
  Synthetic
DKEREVDEILRRVTKLLKELEKRSKEILDRVRELVREYKRKVEEILKRVEDLIRRLIKDKKEVEEIETVLKKILDVVRTIVELLKESLDEAVKVVEDISRVNRESLDRIRKVVEEIVEVIKKVRTKEELKEVIDRIAKKLDEVLKRNEEVIRRVARRLEEVHEKNRRAIEKAVRDLRKVLKELEERGVSLDELRKILKELEELLRTLNKELKEVVKELRELLKELHDRLREILEELKRLLEEIAR

SEQ ID NO: 13415 - protein, 245 aa, Artificial Sequence; identical to SEQ ID NO: 13414
  Synthetic

SEQ ID NO: 13416 - protein, 245 aa, Artificial Sequence
  Synthetic
DEDELIRKLLEDLKDIVRKILELIERDLRDIERVVRRIVKVIRDDLKKIKEVVDDIRRRVPRTEELERVIKRIEELLRTSEEELDRILKEIEELLRESRRRLEEVVKAVEELLRRVEEIVDKGRERKEDVIKLLREVVDDILRLVEEVVRTNLEIIKRILELIERVIRLNLKIIRDILRLLEETVDSELADRIRKLIEDLERHTKKVLEDVKRAITELRKNSKDILEEVRKLIDELRKRIKEVED

SEQ ID NO: 13417 - protein, 245 aa, Artificial Sequence; identical to SEQ ID NO: 13416
  Synthetic

SEQ ID NO: 13418 - protein, 232 aa, Artificial Sequence
  Synthetic
KAEEIAKIAVDAVRKIAELLRRASKINLDAIRKAAKLSKEASKINLDAIRKIAEEVKDAEEIKRDAERIAREDAEAAKRSAELAEEIAKRDEDLARRLEEEAKRLADEIRAEKATEEAAEKALRAIDELLKRAKRASEESARLAEEWIKEDKRLSEESAKLIEDLIRKAEKKNRVDRKALEKARKLAEDALRANKRANDEAKKLADEALKENRKALEDAKRLARKAAEDAKR

SEQ ID NO: 13419 - protein, 232 aa, Artificial Sequence; identical to SEQ ID NO: 13418
  Synthetic

SEQ ID NO: 13420 - protein, 246 aa, Artificial Sequence
  Synthetic
SEEELLRRIRELLKKALEDNKDVLREIEELLRKVTEDNDRVLEEIRKLLEEVDEVVKRAGVDEELLKLIEDILRTEKRVLEDWKRLVEETRKAVEDLLRELERLSREVVERVERLLDELRRRNDEDVVRKIAREVEKIVDTHRKVVDDIRRKVEEIVKKHEELLRDIERKVEEIVRRLKEILERVDKDELRRVVEKIEKVLRDVVRALRELVRINARVLEEILRLIEELVRRNAEVLKRILELVAT

SEQ ID NO: 13421 - protein, 246 aa, Artificial Sequence; identical to SEQ ID NO: 13420
  Synthetic

SEQ ID NO: 13422 - protein, 238 aa, Artificial Sequence
  Synthetic
SKEDELRKAEEDARRVVEEILDLNRESVEKSRRVAERVLRLNEDSVRKSRDVVRRIKEEVNTDDKLLDILEKVLRTNERLSERDLRLIKTILELNERLSERDRRLIKKILEDVRRLVELVRRGTREEELEELVRELIRRIEDILRESEELVRDTIKKIEDILKESEDLVRRTIEEIERKVDDRDVVRKLIEANEDHLRVNKEIVDRLIKANEEHLEVNRRAVEKLIEVLKRLLDVARK

SEQ ID NO: 13423 - protein, 238 aa, Artificial Sequence; identical to SEQ ID NO: 13422
  Synthetic

SEQ ID NO: 13424 - protein, 237 aa, Artificial Sequence
  Synthetic
SEKEDLVRTIEEVVKTIEELVERHERKIDEIVKRSRELVRTHVEKIEEIVRRVEELVRRGGSRDEELRRRILDLVEKLFKHVEEVLKTILKLSEELLKHVTEVLERIRDIIRRLAEKLRRNNVKRESLEKVLEKAKRVLDDVKKKLEDSADENRDVLRRVKEELERSLDKLRKILKSNSDLDTLAEEVKRVLKEHVDLVRKAARLDSETLKKHVDLVRTAAERVSEVMKELVELVRR

SEQ ID NO: 13425 - protein, 237 aa, Artificial Sequence; identical to SEQ ID NO: 13424
  Synthetic

SEQ ID NO: 13426 - protein, 237 aa, Artificial Sequence
  Synthetic
SEIEELVKDIERIVREIKKLIDDHVRKLEKIIEDIERDMRRHEETVREVVRKIEDEVRRGGSRAEEIKRRILEEIERLVEHVKDLLRRILELIERLAENIRRLLRRIEEIVTELVERLRRLNVKRESLEKVKKKAEDIIRRVKKELEDSLEELKDILRDAKRRLDESLKEIREILKSNSDLDSLAKKVSDVARKHLDLARRVIKLISEALKKHIRLVEKAMEDISRILEDLVRLVRK

SEQ ID NO: 13427 - protein, 237 aa, Artificial Sequence; identical to SEQ ID NO: 13426
  Synthetic

SEQ ID NO: 13428 - protein, 236 aa, Artificial Sequence
  Synthetic
SKLEDAVRRIEEILRHIVRSLEEVVKDIEKILRDHVRMLREVVKRIEDVLRRVVELLRRAGDQRELVRELEELVRELVERLRRIVKRNEDLVRDLLDKLRKIVKRNEKVARELVERLRRRGESKEEAVELLREALRLNKKSVEDIERLLKELLDLAEESVEEIERLLRDILKKIADVITDKDVLREVAERIRKVIERLKELLDRSRERAEDVIKKLRDLLKENERLIEEVRRRLEK

SEQ ID NO: 13429 - protein, 236 aa, Artificial Sequence; identical to SEQ ID NO: 13428
  Synthetic

SEQ ID NO: 13430 - protein, 228 aa, Artificial Sequence
  Synthetic
SREEAVADVIRRLEEILEKNLRLLEEIIRRLLRILEHNLRLNEKAVEIIEDLIRKLLRDEKVIREAKKTVEEILRESKRVLDEVKKKLEKILRDLERVHEKVMRDIREILKRNKGKERALETLRRVVEELVRVTEEVAERLKEVVKEVVEANRRVLEKLKKLIEELAEKVVKSRLADDLRRVVKKIVEDLEENLERIKDIIRRLVEELERSLEEIRRLIDRLVKEIRR

SEQ ID NO: 13431 - protein, 228 aa, Artificial Sequence; identical to SEQ ID NO: 13430
  Synthetic

SEQ ID NO: 13432 - protein, 234 aa, Artificial Sequence
  Synthetic
SEEEAAREAERLLEEAARVAERIVRDSERLLDEAAEVARKAVEDSKKLLEDALRAAREGQPRDAIREAAKELEKESKRLAEEIKDAARRLKEETDRLLEEAKRAAEELKKEADRLATEGAAAEDAARALKEAADLLVKVAEDLARANKEAADLLVEVAEKLNRANKEAAELLKKLADDREAAERVARRAERANEEALKEAEEVIKRAKEANKRALEEAKRVIDRADKALKEARK

SEQ ID NO: 13433 - protein, 234 aa, Artificial Sequence; identical to SEQ ID NO: 13432
  Synthetic

SEQ ID NO: 13434 - protein, 247 aa, Artificial Sequence
  Synthetic
RDRDVLRKVKREIEELVRRIEKVSRDALKEVKRLLDENRKIAEDVLRLIERLLRKIRDTRNDDRVVKETEEVLRDNHRLLEELIRRLIKVLEEWLRRHKKLLDEIRELLKEILRLVKESGVSEDLLRRLKRVIEELDKKLKESEEKLRRVVEKAKEDLKRVLEEHRKVLEDLKRALEEVREKLRERDREEVVEELLRMLKRVAEEMKRVHDDLSRAVEKVVRDVVRVDKELLDELRRILRRLEEVIT

SEQ ID NO: 13435 - protein, 247 aa, Artificial Sequence; identical to SEQ ID NO: 13434
  Synthetic

SEQ ID NO: 13436 - protein, 231 aa, Artificial Sequence
  Synthetic
SKDEELMRLLEELVERWRKIVEDLERDHRRLVKEIRELVERIRKKLEELVDRIRKNGIDERIVRLIEEIAKIIEEVLKEIVKLVERAVRENVRVLRESVRLVAELVETLARLLRGADERVTEAIKKVLDTSEDLIRRVIKVNEDILREIAKLVEEVLREAERILTEIKKEVDREEIRRILEELKRIVDDVLRIIARILKLLRDLTRRLAEVAKKVHKLLEELLRKLKEDTR

SEQ ID NO: 13437 - protein, 231 aa, Artificial Sequence; identical to SEQ ID NO: 13436
  Synthetic

SEQ ID NO: 13438 - protein, 234 aa, Artificial Sequence
  Synthetic
KDAETLEKVLRDVLERADEIIKRLEDIYREIKKRLEAIIKEAEDINRKILEEIRRLAEDRKALADVVRKVAEDNLRLNRRIAEVLRELVKRALDVNEELARVLEELLKRLLEIVESANVDELRDIVDKVLKTVKKLLDESRRVAERLKREVERLLKESEDIVKEILERVEELARKITDVKRALEELKDLIDRNLKVLKDLLDATRKLIEENIRVLREILKRIKDIARELLEATK

SEQ ID NO: 13439 - protein, 234 aa, Artificial Sequence; identical to SEQ ID NO: 13438
  Synthetic

SEQ ID NO: 13440 - protein, 242 aa, Artificial Sequence
  Synthetic
SSKEEVLELIKELVRSSKEVLERVVRLNEKSLRISVEVLDRIVELIEEIVRIVVRELEKKVDERLVRKLKKVLEEAKERVERLVKENRDLIREVEEKSKRLVDENKKVLDEVVKEIDEVAKGELDSEEAVRRLLKILDETLRRHKEIVERLLKVNKDLLDRHREILERLKRLLEETLKRVKDTVPEIRELLKEIKRIIEEIDRLVKESLKRHKDINDEIRELAKRTLDEIKEVIDRIRERLR

SEQ ID NO: 13441 - protein, 242 aa, Artificial Sequence; identical to SEQ ID NO: 13440
  Synthetic

SEQ ID NO: 13442 - protein, 234 aa, Artificial Sequence
  Synthetic
SEEEDVIRDVKRRLEEILKTNADVIRDIEEILKEVKERNKRVVEELKDILRKVLEELRKKGVEERVLRLIEELVKKIEEILKRHLKLVEELLRLLREVLKRHLTLLEELVKLAKEVLDARLPKDELKKLLDRLLEEVRRVSDEVRRILEELLKRVEEVVRESKELLKRLLEEVEKLGVGKEVVDLIREIVERLARAVEESLKLLKEIIDLLTESSKELVKLLEEILRTLKEAAR

SEQ ID NO: 13443 - protein, 234 aa, Artificial Sequence; identical to SEQ ID NO: 13442
  Synthetic

SEQ ID NO: 13444 - protein, 235 aa, Artificial Sequence
  Synthetic
SDEERLEKVVKDVIEKVRRILEKWKKDIDKVVKELRRILEEWEKIIREVLDKVRRLKDEVDMLVKVLEEILRLAKELSKRVEEVLREILKLAKRLSDELVKVLREIVKRARDITRDDKLRKIVEDVKRELEDLARKDRKILDDVRELLERIAKEDKDILREAEETLRRLADEMRRTTVDERLLKRVVDILKRLLELNATTIERLLRILEELLKLNKELAERVIRVLEKLLEEIKR

SEQ ID NO: 13445 - protein, 235 aa, Artificial Sequence; identical to SEQ ID NO: 13444
  Synthetic

SEQ ID NO: 13446 - protein, 235 aa, Artificial Sequence
  Synthetic
KDMERVLTEHKKAVKELIELLERLLEEHERASRELIKLLRELLERHKRATDELIKLLRENKRRDEEIVRRVEEITKRVRKIVTEIVERAREITEKIKRIVEEIAKRVREVTKRLEDELKSEKAKKVVDLSREVVKIIEKVLDELVKLSKEVVDIITRVLEELVRLSEEVVRIITELLRRVEEVVKRLEDVNRTLEEIIRKVEEEAKRVNEDLRKRIEDVVRTLEEVNKRLKEITK

SEQ ID NO: 13447 - protein, 235 aa, Artificial Sequence; identical to SEQ ID NO: 13446
  Synthetic

SEQ ID NO: 13448 - protein, 240 aa, Artificial Sequence
  Synthetic
SELEEVAELLKRSKELIDEVEERIRRLATESLRFLDEVVRRIRELLTRLLKEVRDSGVPDELIELIERVIRLIEKVLEDIKRLIEKNIELAERVLEAIKRLVEEDIKLLIEVLRRKEEGRPEKDVKELLKRVEESVKRSLTEIRKLLEEVRKSVERTLEEVKKLAEDVLRLVEEVLKRAKDRGVDERLLKKTEDVVREILRLIEEVLRTHAEIIREILELIERLLELHKTLVDRLLERIE

SEQ ID NO: 13449 - protein, 240 aa, Artificial Sequence; identical to SEQ ID NO: 13448
  Synthetic

SEQ ID NO: 13450 - protein, 235 aa, Artificial Sequence
  Synthetic
SVLETVKRLAEESSERIRKIVEDDKRVADDSSRKIKELIEEIKRRVKELLDRIKDLDSTEDLEKLLDELLKEVKRLLEELLDAHRKWSDDSRRLLERVLRTHKELIDRLIKLLRDAGKPEEVVRRLEKVLRESLRRVKEVIKELIDLNKETLDRLKKIVEDLERVLREVLTELRRKRDKKEVVIRLIEELVKLLEDVLRRLLEVNETLVELNKRVWDRLVRINEELAEVALRVAT

SEQ ID NO: 13451 - protein, 235 aa, Artificial Sequence; identical to SEQ ID NO: 13450
  Synthetic

SEQ ID NO: 13452 - protein, 235 aa, Artificial Sequence
  Synthetic
SVLETVKKLLEDSSEKIERIVEEDERVAKESSDRIRRLVEEDKRVADEILDLIEKITDTDTLLKLVEEWSRTSKKLLDDVLKLHKDWSDDSRRLLEEILRVHEELIRRVKEILDREGKPEEVVRELEKVLKESLDTLEEIIRRLDEANRRTVKRVKDVIRELEDINRKVLEEIERKRDDKDAVIKVIEKLIRANKRVWDALLKINEDLVRVNKTVWKELLRVNEKLARDLERVVK

SEQ ID NO: 13453 - protein, 235 aa, Artificial Sequence; identical to SEQ ID NO: 13452
  Synthetic

SEQ ID NO: 13454 - protein, 251 aa, Artificial Sequence
  Synthetic
SIRELLKELEDVVREIIRDIRRLLEESRRVVERIERETKRLLDEIRDVARRIEETIRRLPLPEEVVKDVLDMIRRLVKEIEEVVRLHLELVREVLESHEKSVRDVEELIRRLVEVVREVVRKLEESRDKDTLKKLVEDIKRILEKILRDIERLNKENARLIERVTEELRRAADRVRKIAEDILRRIEKAGLKKEAVDELRRLLEELKKIVEDILRTLEKLNRELLEIDKRVADRLRELLRTLKKLIEEAAT

SEQ ID NO: 13455 - protein, 251 aa, Artificial Sequence; identical to SEQ ID NO: 13454
  Synthetic

SEQ ID NO: 13456 - protein, 230 aa, Artificial Sequence
  Synthetic
SKEEAIKELLKKHKRITEDIIRMARELDREHEEITREIAERLRRLLKKLLDDVRREVKDERLLREVKKILDEIEKILREALRRTKEILDETKKILDRALKETDEVLERIKELVERGEPKEEVLDAVRRLVELDKKAVDDWNRVNRDLVRVDKEVLKTLLDVIRELIKVLKARTDDERAKRVLDKILDDVRRLVEEAAKLLDESVKKSTDIVRRVRKLLDDSLKEVAELAK

SEQ ID NO: 13457 - protein, 230 aa, Artificial Sequence; identical to SEQ ID NO: 13456
  Synthetic

SEQ ID NO: 13458 - protein, 230 aa, Artificial Sequence
  Synthetic
KKEDDVRRLLKEHEDITREIIKLIRDLARKHLELNKRVIRALEKVLKDLEDEVRKDVRDKDLLRKIKELIKKVEKILRKALKDSKDLLKRLEDILRRALEETKKVLEEIERLLKEGRPREEILEVVKKLVELDKRALDEILEVVTDIVRVDAEAIETALRLIEEIIRELKANTTDERVRRVLDRVVERVAELVREWKELLKRSLDEVREVVKRARDMLRRSVKTVKELVD

SEQ ID NO: 13459 - protein, 230 aa, Artificial Sequence; identical to SEQ ID NO: 13458
  Synthetic

SEQ ID NO: 13460 - protein, 241 aa, Artificial Sequence
  Synthetic
DEVEDARKKLEDLERENRKVIKEIEDALRELVKDHDRVVEELRRRLRRLLEELKKLVDDRKRREETEERLRRLLEALKKLLKELIDKHREIAERMLELARRAIKISREIIEKVREILRRAGVPEDVVREIDKVVRDSLKRLEEVLKRIEEELRRSLKRLKEVLEEIKRKAEELEDILKKIKDEEMLKRVVDVLEDLVRTIEKVLRELSETLRELVRRLLELLRENNESVRRLIRILEEALR

SEQ ID NO: 13461 - protein, 241 aa, Artificial Sequence; identical to SEQ ID NO: 13460
  Synthetic

SEQ ID NO: 13462 - protein, 240 aa, Artificial Sequence
  Synthetic
SEDEAAERLLREAKKILKRLEDAARESLKSAERILEELEKAARDSLRKAEKIIRDAKRKGLDEKALKRAKEALEKAERDHRRALKRAREAIEEAAKRHKEALEEAERAIKRAEEEARKAKKESDERTAAKRLLDAVKELADAAKKAADRALKANEDLARAAKEAADEALEANKRLAKALRDDTTDKEAEKLATKLVEDSERAAREAKKLADENVKRSKEAAEEAKRLADRLVKEAEDDAR

SEQ ID NO: 13463 - protein, 240 aa, Artificial Sequence; identical to SEQ ID NO: 13462
  Synthetic

SEQ ID NO: 13464 - protein, 244 aa, Artificial Sequence
  Synthetic
SEDEELLKRLDELLKEILKVIEELIRRLEKAHKENMDKIRDSARRLRELLRKLAEDEREPTSEETKKRLVDELKELVRRSVEELRRSVEDLKRLVDEVRELLERLLRKLEKLVREIARELEKRSRSDELEKKVEELIRVAETVVKLVADVVRLLIEVAERAVELNREVVKEHEEILETVVELLARGGREELVKEILERVDRLLRKSLERLREVLEESRRRLEEVLRALEEVIKRVRDLLRKLRE

SEQ ID NO: 13465 - protein, 244 aa, Artificial Sequence; identical to SEQ ID NO: 13464
  Synthetic

SEQ ID NO: 13466 - protein, 238 aa, Artificial Sequence
  Synthetic
RKKEELARVLEESLEVNRKLVRDLAEVLRKDLEIIRELVKRLVEILKKILKVLADVIRKEELRRALKEAEEVLRKLIRTLEEVVRRHEEILRKLIEDLKRVVKRWEEVVDRLIKEIEDLEDVLRKLLEVVRRSVRELEKILERLKRSVEEVIKRITEVLEELEKLVRDLIDVLRRAGLDEETLRKVVEDLERLLREARRVVKEAVEKSRRSLEDLRRIIEEAIRRNEKILRKLKEIVK

SEQ ID NO: 13467 - protein, 238 aa, Artificial Sequence; identical to SEQ ID NO: 13466
  Synthetic

SEQ ID NO: 13468 - protein, 244 aa, Artificial Sequence
  Synthetic
KEDELLRRIKEVIDKTLEDMKRLLKKHKELLDEILRLLAELVEENKKLIDEILKLVEDSGIDEKALDELRRVVEEVKEEHKRILEEVARAIKRNKEKVDRVKERVEKVAKEVKDKLDELKRDSDKDKVVREIDRVLKELVDVIRELVKELIDSAKESVDVLRKVVEDSERVLRKLVDVLRRVLDSEEAKELVRRLKRAVEESKKKLDELVKDVKRLADDSARDLRELVKRIAELVKKIRDELRD

SEQ ID NO: 13469 - protein, 244 aa, Artificial Sequence; identical to SEQ ID NO: 13468
  Synthetic

SEQ ID NO: 13470 - protein, 244 aa, Artificial Sequence
  Synthetic
DAEEALKRAREVLKEAADLNRKAVEDARKILKDAADDNKRALEEAERVLRKALEDAKDARARNEDERKALKLLADAAKRIAKLIEDASRATADALRKIAEVIKRASELLARAAKEIARLAREAAERADDEDLRRIAEELAKRLEKLAKEHKDIADRIAEELKRLAREHNEIAKELARRAEELAKKARNAEKAAEDAKRLLEEAEEASKKLIKAAEELLRELAKASKRALDEARKLIEEAEKAAR

SEQ ID NO: 13471 - protein, 244 aa, Artificial Sequence; identical to SEQ ID NO: 13470
  Synthetic

SEQ ID NO: 13472 - protein, 244 aa, Artificial Sequence
  Synthetic
SEREDLLRLIEEVIRELIKLLETNLRLNEETIRTLIRLIKKDLDLNRRSVEELVKLLKERVRDEEKLRKVLEDLERILRKIEKVNRDVIEKLKEILKELRKIHERVIRELERILEELARVVEKLDSEDLARVILDILRKAADVLREVLERSERVTDKIAEVVEEVLRLNREMVREIIEVLKKVLDSEAADEVRKKLAEDERLNDKSLEELKRILDKDREINRRVAEKLTRILETLRKIIEDVAR

SEQ ID NO: 13473 - protein, 244 aa, Artificial Sequence; identical to SEQ ID NO: 13472
  Synthetic

SEQ ID NO: 13474 - protein, 241 aa, Artificial Sequence
  Synthetic
DDLERVLDELRRIIEEIKRRIDKILEDYERVLRDAKRLIDDVLREYRRIIEELKDLLDKVRSEEAVRRIIEVLKKLNEVSRKLVEAIIKVLRELSEISERMVRLAEELLERLVEVLAKGGLPEEVIKTLKKVVEELVRRLREVVKRDRELVRKVEKVLREAVERDKRIVDRIARLLERDGVDKDVLERIKRLLDELRRANEEVVRRVKKILDESLKENRDVVRELKKILDELLEIVAEAAR

SEQ ID NO: 13475 - protein, 241 aa, Artificial Sequence; identical to SEQ ID NO: 13474
  Synthetic

SEQ ID NO: 13476 - protein, 238 aa, Artificial Sequence
  Synthetic
SKKERLKKLIKEHLDLLRRLLKELEDLIRKHLELLRRLLRRLKELLRELLKLIEELVSDEKVLRDIRRVVERVLEELDRVVDRSEKVVREVIERLRDALRKNTEVVKTVIEKLDKIEDEDTALKVLEEVVKESVRLVEEALDIAVTVVKESVDLVRRLLDSLLAVAKELVDLLREVLRKADLRDRVEKEVRRALEKVERLIREIKRLVERSLEEVEKLIREIKKRVRDSLRKVKKESE

SEQ ID NO: 13477 - protein, 238 aa, Artificial Sequence; identical to SEQ ID NO: 13476
  Synthetic

SEQ ID NO: 13478 - protein, 242 aa, Artificial Sequence
  Synthetic
DEIETVLKRLAELIKESLDLLRETLDELRKIIEESKKSLEDVLRRLKELIDRLRRLAEEKTGEELLRLLIEVIERLLKVVEDLLRESNRVVERLIRVNREALRLSNRVVADLLKVLKDAAPDVEELRKLAEDVLRENRELSRESVKIAEKMLEENRDLTRRLKELAKKVLEEIRDLVRRVRDKDELLRRVEEILKRLLELIRRIIEEHRKILERLLETHEDLIRKHEEILRRLLKAADEERQ

SEQ ID NO: 13479 - protein, 242 aa, Artificial Sequence; identical to SEQ ID NO: 13478
  Synthetic

SEQ ID NO: 13480 - protein, 238 aa, Artificial Sequence
  Synthetic
SEKEDVLRRVEEIARRVRDILRRNLEKVERIAEELKKINDDLLKEIERIIKELKEVLRDVKDKDLVERLLRVLAELVDVLREVVKRSVEVLEKLIRVNEEVIERLREVLRELVEVLARGGVPREIIETLRRLVERLVKILEKNKEDLKRLVDENRDLAKKVLEILKELIKRLRDVLRERKEAIEEVLEILDRILKTARDVSKENLESLKRALELDRRTNERLEDLLREILELLRKDIQ

SEQ ID NO: 13481 - protein, 238 aa, Artificial Sequence; identical to SEQ ID NO: 13480
  Synthetic

SEQ ID NO: 13482 - protein, 246 aa, Artificial Sequence
  Synthetic
SELEELRKLAEEAIEAAKRALDRLHKLSRELIEAAKEILKRLKKLSEDLIRAAEEAARRSESEKALEDAKRAIDELRRATERVEKRVREAIKELEEANKRVAERARKAIEELKEAVRRVEERARRGETKEAAEEALKAVRDAAKAAREAAEDHLRALKKAAKAAEEAAEEHLRALERAARAAEEALRGEDAKRAKEIAKEAIERSKKIADEAREIAKRAIDKSKKIAEEAKKIADEVLKRAEDIAR

SEQ ID NO: 13483 - protein, 246 aa, Artificial Sequence; identical to SEQ ID NO: 13482
  Synthetic

SEQ ID NO: 13484 - protein, 250 aa, Artificial Sequence
  Synthetic
RESEELIRLLRKIIELLEELVERIRDLLRKHLKLLEEVVELLKRNLDEILRLLEEVLREANVEDAKKVLTDVADLARKSLERIKKVLEDSRRLAEEVERAVEEVLERVKRLVEELEETVERLKDGRKEEVLKVAKDILDKIVELVERLLRVVIEVVKKSIDLLERLLEEHERVVTEIIKLVKRLLEKAVKDTEKAKKLEELLRDLLRTVREIVKEVRELLEESLRTAEKLVEDIKRELDELRKRLKELVD

SEQ ID NO: 13485 - protein, 250 aa, Artificial Sequence; identical to SEQ ID NO: 13484
  Synthetic

SEQ ID NO: 13486 - protein, 239 aa, Artificial Sequence
  Synthetic
DEERLVEEIIRTIKRVIELNEESLREIERVLEEVIKMDKRSLEEIKRVLDEILKLARDGDVSERLVERVERLVRRLIRKNEEIVRRVREKVERLIRKNRTLVDDVRRKVKELIEKLRRTGLKEDLERVLRKILELLERLSEDTARVLEELLRLLEELSRRTAEVLKRLLDILRELAKLRGEELERVLRELKKVLEELIKDNERVNDELRRVLEKLKERNRKVLEDIKRVLEELRDEVER

SEQ ID NO: 13487 - protein, 239 aa, Artificial Sequence; identical to SEQ ID NO: 13486
  Synthetic

SEQ ID NO: 13488 - protein, 241 aa, Artificial Sequence
  Synthetic
SSEEIIRTLEKAIRESEEKLERLVRRDEEVVKDLRTKLRENLDRVRRMVEELVRMLESGKPAEDILREAERLSKENIETLEEILKKAERVSEESIRVLEEILKENEEVVRKIIKDLPKTEKADEVVERLKELLKRSEDVIRKVVEDSERLLDRLRRVIEDVVRRSRELLTKLREVVKRVRDKDTLVKVLKEVLERHVEADEKAVRELAKVLEENVRLLEELVRVNKEVLRRILELVKELAK

SEQ ID NO: 13489 - protein, 241 aa, Artificial Sequence; identical to SEQ ID NO: 13488
  Synthetic

SEQ ID NO: 13490 - protein, 233 aa, Artificial Sequence
  Synthetic
SKEEKLKDDVRRVLEDLDRVLKELEKLSEDNLRELKRVLDRITDLHRRILDELRKKITEEELLRRVEKVLKDNLDLLRKLVEEHKESSERDLKRVEDLVREIKEVLRKLLELEDRDTDIRKIEEEIERLLRKIRKAVEESKDLNRRNSERIEEVMRRSEELARRLLKEIRERIDSKVAEDILRVLEKLVKVSREAIKLILELSEHHVRVSTRIARLLLDVARKLFEVIKEAER

SEQ ID NO: 13491 - protein, 233 aa, Artificial Sequence; identical to SEQ ID NO: 13490
  Synthetic

SEQ ID NO: 13492 - protein, 233 aa, Artificial Sequence
  Synthetic
KKEDELEKMVRDVLEDLDRILREAEELSRKNNDDLRRVLDRLRRLAEEVIKRLEEKVTIRELLEELKRVIRELLRRVKELVEEHHRSSREDNRLLKELVERIKKVLEELLRLVRNDTDRREIKKLLDELKRLIEEVARESRELNKKNSERIREVVERLERLVEKLLEDVARTIDSEVARVILEILKRLLKALKEAAEELKKISEHHLRVSEKVVRDLDRVVKKIVDVARRVAT

SEQ ID NO: 13493 - protein, 233 aa, Artificial Sequence; identical to SEQ ID NO: 13492
  Synthetic

SEQ ID NO: 13494 - protein, 242 aa, Artificial Sequence
  Synthetic
SEKEKLLRDLEEVVRDVIRLSKESVDKLKETVDRLVEESRRTVEELRRIVDRVAKEVKSKEVLDKTRDIVRKVEELNERIIRAIEDLVRKVEKLNEEVIRAIEEVVRRMAELIRDKREDKERVDRVVKELADELRRVLEKYEKILRDLARELKKLVDEHRRVVRELAEELRKILKELKDKRGDDEIVKLLEDVVRELVEVLRKSTEVIERAVKKLVDILRESLKLIEDVVRRLVEIMEEIVR

SEQ ID NO: 13495 - protein, 242 aa, Artificial Sequence; identical to SEQ ID NO: 13494
  Synthetic

SEQ ID NO: 13496 - protein, 238 aa, Artificial Sequence
  Synthetic
SEIEDVIRRLRKILEDLERVSEKLLREIKKILDEARRLNEEVIKEIKRVLEDAVRVFRDIRERKEELRKLVEELIRELRKLAKEVDEIHKRIVERLKKLVEDAERIHRKIVETLEEIVRRVPREELKRVVEAIVEVIKEHLKVLKDVIRRIIKAIEENAETIKRVLEDIVRVLELVLRGEKRIEDLVREVERLIKRIEDSLRELEKTVRELLKRIKEASDKVREDVDRLIKELKEAAD

SEQ ID NO: 13497 - protein, 238 aa, Artificial Sequence; identical to SEQ ID NO: 13496
  Synthetic

SEQ ID NO: 13498 - protein, 246 aa, Artificial Sequence
  Synthetic
SREEIVATLEDLARKILEVVKKLAKEIEDAWREIERKVREILKRLEELWREIEDVVRKKVDSRVAEILETVVKRVVDITRRLIEEAERVVRELVDITRKLITILEEVVRRLVEIVREASKIDDRRELEDMLRKIREVVREVIERLKKLDEDVRRVVEEVIRRLEELNKRLEDVIREVKKRLEELELERELVKELVELLEEILERNTRVIKEIIDLLRTVIRIHEKIVEDLIKLLEELLRRLEEATR

SEQ ID NO: 13499 - protein, 246 aa, Artificial Sequence; identical to SEQ ID NO: 13498
  Synthetic

SEQ ID NO: 13500 - protein, 237 aa, Artificial Sequence
  Synthetic
KEKEDALKKLEDLARKSREDLERVLRKHKKILDKIEELLKRVLDEHKKIVDDILRKTGTESEILKELARLLREHHEALRRLIEELRRLLEEHHKILEDLAREHKRLLDELIKVVADGVDKDELERIIKELRERDKKLVDDLRKVSEDLLDAVRKLVEDLERISRELLRRVEELAKDIEEELAREVERVIKELLDKSKEILERIERAIDELLKVSEEILKLSEDASEELLKILREFAK

SEQ ID NO: 13501 - protein, 237 aa, Artificial Sequence; identical to SEQ ID NO: 13500
  Synthetic

SEQ ID NO: 13502 - protein, 237 aa, Artificial Sequence
  Synthetic
DEKEEALKTVERIIRDIVRRLRELLKEHEDIVREIERELKEVHEKHKRLVEKALEELGTEDDILRKVEELLRRHNEILEEVIRRVRELLRRHHEVLERIVERLRELMKRLLDVIRRGEPEDELRKILRELLETVKRIAEELRRLSKRLLDEIRRLAKELEDVSRDLERRVRELLKDLEDRLADLIRRAVDRLRDISREILKRLVEVIERLLEVSEKILKLVEEVIRELLRVVEEAAK

SEQ ID NO: 13503 - protein, 237 aa, Artificial Sequence; identical to SEQ ID NO: 13502
  Synthetic

SEQ ID NO: 13504 - protein, 251 aa, Artificial Sequence
  Synthetic
SVVEILAEVLKRLLDILRKLVDAIRDVVKKHVEVVEKLVRLHEEVLRRLVDILRKIAEVREGEAVKRLLEEARRVLEDILRKSKKINEESERIIEEVIERIEEILRRIEEKLKEILDEIRRAGIPESKKRIVDELVKLVREILKELKKVVDDWAEIVRRLDEESKRLNEEALKIVEDLLRKLEDLERKPVDEEILRRLVEEAKRLVAESIKKLRDLVRKIREAHKEAIKRLEEIVRKVEEIVRKVIDELRK

SEQ ID NO: 13505 - protein, 251 aa, Artificial Sequence; identical to SEQ ID NO: 13504
  Synthetic

SEQ ID NO: 13506 - protein, 248 aa, Artificial Sequence
  Synthetic
SDEEKLRRLLEEVRRLAKRVIDELERVLRESKRLAEENIEELDKALEEVKRLIDDVIKKLRDGARIEEVVEEIRRVLKRVVELLRRVSDDTRRILERNVELLERIVEKLERVLRRVVRVLEDVTREERLKELVRRVEELLKEVLRRVREIVKRLADLHRKVLKESEDLVRKVEEIAKDIVDKLRTTTDSETIERLLRELLKVLKEIVDRHRRIIERLLKASEDAVRELKKLIEETLRVLTDVVRRTET

SEQ ID NO: 13507 - protein, 248 aa, Artificial Sequence; identical to SEQ ID NO: 13506
  Synthetic

SEQ ID NO: 13508 - protein, 235 aa, Artificial Sequence
  Synthetic
SLVDELRKSLERNVRVSEEVARRLKEALKRWVDVVRKVVEDLIRLNEDVVRVVEKVTVDESAIERVRRIIEELNRKLDAVLKKNEDLVRRLTELLDKLLEENRRLVEELDEDLKRRGGTEEVIDTILELIERSIERLKRLLDELLRIVREALKDNKRVADENLKKLKEILDELRKDGVEDEELKRVLEKAADLHRRLKDRHRKLLEDLERIIRELKKKLDEVVEENKRSVDELKR

SEQ ID NO: 13509 - protein, 235 aa, Artificial Sequence; identical to SEQ ID NO: 13508
  Synthetic

SEQ ID NO: 13510 - protein, 229 aa, Artificial Sequence
  Synthetic
SKEERLREVAEKHKKDLEDIVKRVDEAAKETKRRLEEILKRLEEVLKKILDDLEKGPDDEKLKKVKKILKDIMDRLRELIKKILKLLKENLEKIKELLRRNLEISEELLKLAKDLRDRDVLETVRRVLEKLDEEWDRVLEDSRRIIETILRELDTLLREVEKLIKEIKDEIKDLKEVLDILERAVEVVRRVIKALKEVLERHVDATREVIERVKRVNKRLLEAVREVVT

SEQ ID NO: 13511 - protein, 229 aa, Artificial Sequence; identical to SEQ ID NO: 13510
  Synthetic

SEQ ID NO: 13512 - protein, 232 aa, Artificial Sequence
  Synthetic
SREEKLEELIKELERRLKDVLDRSRELNREIRKTTEEVIREVDRLLREIEKIVRDVRLPREIVELIDRLIKRLREILKEHKELVDEVIRRNEKSNRELVKLLEEALREARREGADEKLIRVAEELLKRIEEIIRRNEEIIKDLKRRSKRLLEEARRVVKDLLRRLEELLRRLDEDTARLVREVAELIEKVVREIVKLIDEDLKKLERVVRENARLLREVVELLLKVVRDVAK

SEQ ID NO: 13513 - protein, 232 aa, Artificial Sequence; identical to SEQ ID NO: 13512
  Synthetic

SEQ ID NO: 13514 - protein, 244 aa, Artificial Sequence
  Synthetic
DEKELLEEIIKKVEDLLRESRELWERLIKRVKELLKRSKETVDEILKRIKELLDELRKVAAEGAPEEELVKKIKEILETVKRLIEEHIRTNEEVLKEILELLKRIIERNRKVLEDVLKDVTDTGVPEEVLKELKKVIDDLERLNEEVLKEATEVLKRLLDINARVLEELDRVVRELEDLLRRLTDKRLLDVIKEIVEKLIEVVRKLLEADKRIIEELIRVLEKIAEVDETIVKRLIEVLKKIAD

SEQ ID NO: 13515 - protein, 244 aa, Artificial Sequence; identical to SEQ ID NO: 13514
  Synthetic

SEQ ID NO: 13516 - protein, 244 aa, Artificial Sequence
  Synthetic
SEEEDIERVLRELKKLHKDHLDLLREVVKRAEELLRRHLEILREVLKREKKLLKDVLRDARRREEAEEVVRRVEKELDRVLEDSERVLRELLERLKKVLEEIKRVHERVTRDLERVLRELRDVRSEEVAKLLTELLERSIRVIEESVRLSRRALEVLIRVIKESVDRLEELLRDLIRVLKELRDKGVITDELLEEAKKLVKEVRELAEETLRRLARLVEDVKRLNDEAVKRLRELVRRIKEEVR

SEQ ID NO: 13517 - protein, 244 aa, Artificial Sequence; identical to SEQ ID NO: 13516
  Synthetic

SEQ ID NO: 13518 - protein, 237 aa, Artificial Sequence
  Synthetic
RTEEILREIVDLLRRVAEENLRTLEELVELLDRVARRNLESLRELVRILEEVLKKLLKKDKDEELKRVIDEIKKVLEELIETLKRVIDESREVLKEIRKTLEKVIRETKKELERLIELLRRGVPVERLMEELKRLLDRHKDVIRKLNELLKRLLERHVKVVRDLNRALKALAEKIREDIRDEDVLRELDEVVRRVIERDREILRELKRLVEEVIRKNEDIVRKLEEAVERVLRKLKD

SEQ ID NO: 13519 - protein, 237 aa, Artificial Sequence; identical to SEQ ID NO: 13518
  Synthetic

SEQ ID NO: 13520 - protein, 239 aa, Artificial Sequence
  Synthetic
SEKEEVIKDLRKVLEEVLRRHEELVERLKEVLRKVLEDHKKLVEDLKRVLDEVRRKLENNADLETVIKELLEVIRRVLEDSNRVVEELVRAVEEVLKESIRVVKRLIDTVDELLRRLTRTEDVKEIVDRIRKKLKELLDTNRELVERVRKLLEELVETNRRLTEEVKRKVEEILKLARNGLDREELLRRLERIVEDIIRLLEESLKLAAEVIKTIIRLLEESLERLKRLVDDIVEKLRK

SEQ ID NO: 13521 - protein, 239 aa, Artificial Sequence; identical to SEQ ID NO: 13520
  Synthetic

SEQ ID NO: 13522 - protein, 243 aa, Artificial Sequence
  Synthetic
SEKELLERLEEVERRLLEIVRRLLKRNRDVHEELLRIVEANLRRNKKVHEDLLEKVRKSVRKEEVKKVIDEVDKKSKESLEELKRVIEEVKRLSEETLKKVEKVIKEVEEELRRVLDEARRNPDKDVLKKAIEVARRIIEELARVLKDDIDRLRELIKTLADVLKKDIDELRRLIKRLMEEERVDKVVKELEDIVEELMEENKDSLRRLKEIVEELLEENRRVLEKLRKIVEDVARELEETAT

SEQ ID NO: 13523 - protein, 243 aa, Artificial Sequence; identical to SEQ ID NO: 13522
  Synthetic

SEQ ID NO: 13524 - protein, 234 aa, Artificial Sequence
  Synthetic
SIEEVLREIVKLLREVLERLIRVDERLVEALKRVAEKNIEVLRRAVDALRKVLELLRRGQDKRDVDRELRRVLDEVKKEIERSIEELKRVLEEHRRRIRKIIEELKRVLEEARRKLKSERLLEKLTRLVEKTIRAIEKLHREWERILREHIRLLEELLKRLKELLDELRKLIEDGEDEETVIRRVEDVLRDLLRRLEEVVRRSTEEAKRLLKESRDVVRDVEKTLRELLEELRR

SEQ ID NO: 13525 - protein, 234 aa, Artificial Sequence; identical to SEQ ID NO: 13524
  Synthetic

SEQ ID NO: 13526 - protein, 234 aa, Artificial Sequence
  Synthetic
SVEEVIRKAVTDLDRVLKTNIRVDERLIEMLKRVADENREVLEKIVRLLKEVLDLLRNGRDERDVAKRLREVLEEARRDIERSIRKLEEVLRRHREAIKRSIDELREVLERLERKLRSEDVLRKLEEILREHEDMLRKLHEEWERILRRHIELLKRLLEKIKRLLEELLRLATEGEDEKEVVDKVKRVLDELRRDLERVVEESEKLARDLLRKSRDVVRRTRELLKKLLEEVET

SEQ ID NO: 13527 - protein, 234 aa, Artificial Sequence; identical to SEQ ID NO: 13526
  Synthetic

SEQ ID NO: 13528 - protein, 247 aa, Artificial Sequence
  Synthetic
SRRETLEKLLKEIEDLIRESLERLEKLLEENRTLIDDDERRVRELARDIKELIKEIEERLRRENVEEALKVVREVLRIADEAIKLHIEASRRVLELSRRLVEDHKRATKEVLELLRELIRRLIEVEERKEDKREVKKDVERILREIEERLEEVLRRNREIHEEIKEDLKRVSKEVRDLLREIKKTLEDGKVSEEILKIIEELIKRLEKLNEDSNELMKELVKRNERLARENLKLVEELLRRIEETTR

SEQ ID NO: 13529 - protein, 247 aa, Artificial Sequence; identical to SEQ ID NO: 13528
  Synthetic

SEQ ID NO: 13530 - protein, 234 aa, Artificial Sequence
  Synthetic
SEVERLRELVERWREELKKLLDELRKVVEEIARELKKINDELRKLVEDIAREARRETKKRELLKELLTRLIKLLEEANERVRDLLRRLLEIIDEILRRLRELSKRLIEEARRETREERVKRALEEVVRTSEEILRELKEILDRVREELKRINDDSRRIIKEVVDRLREILEKADKDDDERVIEELIRVLRKVVEDHADVTRRLVEVLRKVVKLIEEVLKKDEKVLRDIVDRLKT

SEQ ID NO: 13531 - protein, 234 aa, Artificial Sequence; identical to SEQ ID NO: 13530
  Synthetic

SEQ ID NO: 13532 - protein, 237 aa, Artificial Sequence
  Synthetic
SEVEEVVRVLEKVLRLLRRLVEELHRLSERVLELITRLLKELKDLSREVIKRLEDANIDDRVREKLKRVHEKLERVVEEVLRRIRTVNEDLKRVVKKLEEKIKKVIDELRRENASEEALRKVAKVIRDVVEEAKDVVRRHVEVVRDVIRLLEEAIESHVRVVRRLIEELLRKLAEERKKEKIDELRRVLERVEREHRRVIKKIRDVVEKVKRDHERVLREVEKVVREVRTELEKLRE

SEQ ID NO: 13533 - protein, 237 aa, Artificial Sequence; identical to SEQ ID NO: 13532
  Synthetic

SEQ ID NO: 13534 - protein, 253 aa, Artificial Sequence
  Synthetic
SVEEELRELVKRVEKLVERLRRIVKEIIERSRDLVRKSREVVDRLKKELDELVKEVVREEGEDSEVVEVIEKLVRLATRALELHIKSLEKHVKLNEEALRRLIEVIEELVKLIREVVKELLRITRRGEPEEELKRIVDRAKEEVKRVLKKLREILEEWKKKIRESLKENKTIVDKVKRDIERVLEELEEAKVASDEVIRRIAEVVKRLIDKLKELSDDNRKAVEDHERLVRKAIEELVREVEDILRRIDETAR

SEQ ID NO: 13535 - protein, 253 aa, Artificial Sequence; identical to SEQ ID NO: 13534
  Synthetic

SEQ ID NO: 13536 - protein, 241 aa, Artificial Sequence
  Synthetic
SEKELLKEILDRIRELLEDDNRLLKRIVDEIRKLLEEWLRVHKEILERIKELLDRINAPEDVIRELTRALKETEEDVDRVIRTLEKLLKEVLDRHEEVVRKLDRLLKEVERLVEERDAEEVVRDLLRVVKEILDESKRVIDELARVVDEILKLLEEVDRKLAKVVKEILEDVLRAKKDDEDMVRKIRKIIEELKRLLEDLRRDTRRVIEEAKRLLKEWRDRNKEVADTLKKLLEDLIRKIR

SEQ ID NO: 13537 - protein, 241 aa, Artificial Sequence; identical to SEQ ID NO: 13536
  Synthetic

SEQ ID NO: 13538 - protein, 242 aa, Artificial Sequence
  Synthetic
REDEIVEDWRRLLEEAKRRSEEVAKEIRDRAREVTKESKRVADEWRRLLEEVKKRAENIDERVLKLIDDNIRDVERIIRRHEEIVKTLIRLLEEILDRHRRLVERNIESVDRLLKAVKNGEPIEELVRRIEDLSRKLVETNRKLSEELKRMAKKLLDENRKLSEELVKRSRDVVKEIEDGGLGEELVRVARDLVRLNEEVLRKSNRSVEELLKALARVLDRSNKSLEDLVELNKRVLDKLRT

SEQ ID NO: 13539 - protein, 242 aa, Artificial Sequence; identical to SEQ ID NO: 13538
  Synthetic

SEQ ID NO: 13540 - protein, 242 aa, Artificial Sequence
  Synthetic
RKEDLVREWRELLRKILEDLEDLVRKWRKLLKKILDDLRELVRRVREELDKALRTVEKGELDAEEVLKELERLVEEIIRAVRELLKRLSDLNKKVLDELRRLVERLSKLNKEVLDKIREEERSRKIEEILRELEELNRRSLKKLEKILKELDEADKRSLKEVEDVLEELKRRIREILELMKAGKDLRDLVRKIIEIIEDILRLLEEVLRKNVKAVEEVLRLAIRVLEENIEAVEKVLEDVRR

SEQ ID NO: 13541 - protein, 242 aa, Artificial Sequence; identical to SEQ ID NO: 13540
  Synthetic

SEQ ID NO: 13542 - protein, 243 aa, Artificial Sequence
  Synthetic
SEEELLREIEKILDEVRKLVEKLLEDNRRLADELIKLIKELLDRNLRLIERLLELLERGTDADELVKEARRMLEESKRLVTELVKTVEDVLRKSERLVEELERRVRELLKRLKDLVRETGGDKLKKVIEDLERVLKELLDALREVVKRSVKVWRDLLRALDDVVRRSVEVVEELLRVVKETGPGEELREVLERALRKAKKIHEDLKRIVEDVRRRNDEILKDLERVLKEVEDKIRKILDELRK

SEQ ID NO: 13543 - protein, 243 aa, Artificial Sequence; identical to SEQ ID NO: 13542
  Synthetic

SEQ ID NO: 13544 - protein, 235 aa, Artificial Sequence
  Synthetic
RDEDIKRELVRLVEEILRTSARLLDESIKSNKKTLDDIERVAREIVREIEELLKRIADGNKLDEEVLRRLVEKIRRAIEEVERLLERLKEKIKRSIDDLKRVLEETARRLEDVLDKVRKDEDKDRVVERLIKVIREVLELDKRLSEENLKVLKEVLDLVETVAKRLIDVLKEVADDIKDADELKKDIRDVLERVKRIAEELRELVERDIREDKRLLDELAKLWRDLLKMIEDLRR

SEQ ID NO: 13545 - protein, 235 aa, Artificial Sequence; identical to SEQ ID NO: 13544
  Synthetic

SEQ ID NO: 13546 - protein, 248 aa, Artificial Sequence
  Synthetic
SEDELLEKIVRKLREAVKRIEEELRKSKREIERLVKEIKEKLEDSLRRVKETLDRIRETRKKPQDEEVLERLVRTLEELLRRHLKLIEDIARELKKLLKEHLDRIETIVRDLKRLLKEILDELERTGLPREVLEKVRELVKTVARLLDEVLKNNKKLLDDLKKELDDVLKNNKRIVDELRRLLERVRRRKEDLEELLRLLKEVIERSIESLERLLELILRVLEYSVRSLEELLRRLLEVIKRIVDTTK

SEQ ID NO: 13547 - protein, 248 aa, Artificial Sequence; identical to SEQ ID NO: 13546
  Synthetic

SEQ ID NO: 13548 - protein, 237 aa, Artificial Sequence
  Synthetic
DEDEIAEELKRLLREVEEKSKEIVRRMRELAREANKKSEDILRTLEKLLEELRRRVEENRRSSKAVLDKIREVLETLKELLDRHHETVRDLVRRLKELLDRHNETVKKLVEDIKRLLDESGGRREIKKRLEDALREHNRIIKEIKKLLDKVLKDHKDILDDIKKKLDDVLREVTEILKRNRIDEVVRRIERVIREVIKILARANKRLHDVVEEIIRLLEEVTDELRRVVEEVIRRTK

SEQ ID NO: 13549 - protein, 237 aa, Artificial Sequence; identical to SEQ ID NO: 13548
  Synthetic

SEQ ID NO: 13550 - protein, 238 aa, Artificial Sequence
  Synthetic
DKEEEVRRLIEENLKKIEEVIRELEKIIRDNLRKLEEVVREIEEELETTLRLIETDGVSEEVLREVLKRVEDIMRKLRDVLREVRELHEDVLRKVEEVLKDVKRLHEEVLKKLEDGLDLTKVLEELRRINDKLLKKVKRVLELLEEINRRALELVREVVERLLRVIERLIDLLRRSGVDEDLLRKLKELLETLKRRIDEIEKKLEEILKETKDLIRRLLEKLKRIDEELRKTLEDLRR

SEQ ID NO: 13551 - protein, 238 aa, Artificial Sequence; identical to SEQ ID NO: 13550
  Synthetic

SEQ ID NO: 13552 - protein, 242 aa, Artificial Sequence
  Synthetic
DDIDEILRRLREEIEDARRKLEKILRELRERIKDYKRKTDELLKESRKRIREAEDRVRRDGARDELMRKLSKEDEELTERLVRTHEKALEDLTRAVERLLRLLKELLERLKRILEEIRKRGRVPEELVKRLREVLKEVERRVEEALKRVKDVLDKSKRDLEEAVKRNREVNKKLRDEVEKRRDDKVLEALLEKLLRSNEELVKIDRDLLRDLLRVLEELIKTVRDLLRELLRVLEEVAREIK

SEQ ID NO: 13553 - protein, 242 aa, Artificial Sequence; identical to SEQ ID NO: 13552
  Synthetic

SEQ ID NO: 13554 - protein, 242 aa, Artificial Sequence
  Synthetic
REEETLRDIERLLRKLLEELKRTADELIDSHRKLIKKLKEILDRLRRSHEKLIETLRRRLTDEEVLKEIIEVNKKVLDDVTRILEEIERLNKRAIDRVKEILKRIEDTLRKVLDDVRKDKDKDRVLDKILDVLRKVVELLKRVLDESARVVEEVLTLVKEVLERSLEAVEESLRIVERRLSDKEDVKRELREVVKEHKEDLDRIKKELKELLDRHTETLKRIVKKLRDLLEEIRKALEDLKK

SEQ ID NO: 13555 - protein, 242 aa, Artificial Sequence; identical to SEQ ID NO: 13554
  Synthetic

SEQ ID NO: 13556 - protein, 232 aa, Artificial Sequence
  Synthetic
DEERVVEEAIRVLKEVLDLHRELIKRSIDVLKESLKVHERAVESLERVLKEILDLVRRGKREELDRVIRRVMEDLKRVHEELREIHEEVIRRLDEVHRRLKKVIDRLKTRLREELRIEKRLRDAEEILDRLYRENERVLRTLKKLHRDHYETNRRALETLLRLLEETEKLDKSGTKEEEVAERVKRIIEEVRKLAEDSRRKTEELIRRVKELAERTDETVRRVIEELRRRTK

SEQ ID NO: 13557 - protein, 232 aa, Artificial Sequence; identical to SEQ ID NO: 13556
  Synthetic

SEQ ID NO: 13558 - protein, 232 aa, Artificial Sequence
  Synthetic
DEEDVARKLIEVLKELLKLVEDLIRTNIRVLEESLELHRRLIEEIEKVLKRILELLEEGRREELERVARELLKELDRVHEELKRVHEEVIRDTDRVLKEIEEVVRRVLKELREEVRIEEKLRDMERILRKILEDIRRLVKRLKKLHEDHYRTNEEVLRETKKILKRTLELVRSGTDREELAKEVKRVIEELKKLARESAEESKRIIRTIEELLREARKRAREVIEELKERTR

SEQ ID NO: 13559 - protein, 232 aa, Artificial Sequence; identical to SEQ ID NO: 13558
  Synthetic

SEQ ID NO: 13560 - protein, 237 aa, Artificial Sequence
  Synthetic
DAEEVLRLLAEVLERIIELIKKVNEILIRVLREVIRLIEEVNELVREVLKRIIELIRRDIDDEDVRRLVERIKTVAEELHKEVRKLVKEIEDLARKSNEDVRKLVKDIRRVVEELKRANLRKDRLAEAVEDLLRRILEAIKRHLRKAEEIIKRILEAIREHLKKLRELAKEIKDAARKAGVDERILEEIERLVREVEEIHERVLRRLKELLKKVREVHEEVLRRIERLAERVREALK

SEQ ID NO: 13561 - protein, 237 aa, Artificial Sequence; identical to SEQ ID NO: 13560
  Synthetic

SEQ ID NO: 13562 - protein, 239 aa, Artificial Sequence
  Synthetic
SVREELEKVIREVIEEVERVLERIRDELRKSLERLKEVIKRIEDVHRDLIRRIREIKDLEKVLRLVLDVLKKVSDLTRELLRENLEVLEKIAKLLEDLARSLLKVIRRLLEILIREFKDDEELLRRLKELVDKIRKILRDLLERVKEVVDRHRKKLEELLKRDEDLLEEVKRRLDDIRRENVPIEEVLKTVEDISRRHRELLKRILDTSKRSIEETLKLAREILETLKRLLKELLDAAK

SEQ ID NO: 13563 - protein, 239 aa, Artificial Sequence; identical to SEQ ID NO: 13562
  Synthetic

SEQ ID NO: 13564 - protein, 240 aa, Artificial Sequence
  Synthetic
DAEDEARRVIDEAVDRLRKAVEEIAEVARRHLEEVEEVVRKLEEIIRESLERVRRASEAREDRALEKIATELRKLNEDVRRELERAAEESRRKLEELRRRLDKVVKDLRELLKRLRDSGDVAGEVLEALKRVIDTVVRLLEEVLRRLAEISEEVLKLLREVLEKHHDVTRKVVDLLRKVRRDKEAEEVVRRVERLHEDVLRRLKEVVKRVKELHEEILDRLREILDRVRELARKVREDLR

SEQ ID NO: 13565 - protein, 240 aa, Artificial Sequence; identical to SEQ ID NO: 13564
  Synthetic

SEQ ID NO: 13566 - protein, 233 aa, Artificial Sequence
  Synthetic
SEKERLSKIAEDLIRRLEEELERVERTHERLLRKLEELLKKIEKEYRDAMRKLETLTGVSERTLEELVKELIDISRKIVKRLEETVTELREINDRLVKRIEDLIRKLIEDLTREVEKKEVLERISRELEEVIKRLRKVVDESRRKIEEVLEELRRAAEESTRALEEVLKELKRGKDIKEVLDDLKRVLERDLRAIKKIVKELKRILKENLDVLREIVERIKRVLEKILREVEK

SEQ ID NO: 13567 - protein, 233 aa, Artificial Sequence; identical to SEQ ID NO: 13566
  Synthetic

SEQ ID NO: 13568 - protein, 248 aa, Artificial Sequence
  Synthetic
SREERLERVLERVKRAIDRYRDMLRRLLKTVEDLIRKYEEDLKRLLKEAKELIDKVKEENKDVEEVKRVLEKLLKVLEDLVRKVRKSAEDLREIVKKLVTDVERSLELLLKIVTELVEAAKRTETKEALDKVLTEAKKKVDEVLERSRKVLEDVRKELEEVLKHSEKVLREAKKELEKIIKEVEDAGTDEEIKKIIDRLREEIERILDELRRLNEELVETLRRVLETLRELNERLVKLLRDLLREEKK

SEQ ID NO: 13569 - protein, 248 aa, Artificial Sequence; identical to SEQ ID NO: 13568
  Synthetic

SEQ ID NO: 13570 - protein, 246 aa, Artificial Sequence
  Synthetic
DEEEKMKKIEDVARRYKEEVKRVLDDLERLLRESEEEVERIVRKLEKLARDLEERVRELTKKEVVERLVRELLKAIKELIDVLRDVVRLSAEVIKELLDVLRELVELNLRAIKEIIEVLKKLKSEEVKKRLDEILEKIEKVNTDVNRRLKEIIRKLREIHEEVLRELDKILRDIERVVRDVERRIDDKEVIDALKELLKVLEDLLREIKEALTRNLEKIDELLKLLHELSRRVIEELRKLLEDLKR

SEQ ID NO: 13571 - protein, 246 aa, Artificial Sequence; identical to SEQ ID NO: 13570
  Synthetic

SEQ ID NO: 13572 - protein, 241 aa, Artificial Sequence
  Synthetic
REDEELARKAKEVLKETEDLLRKLEEEVKRVLEEIKRMNREVREKVKEVIKELRKRLKDLREVLKELEELLEELLRSDTEVSRLLEEIVTRVLRVLEKVVRESKKAVDKILEVLKKVKGKDVVKLLKDILREIEKVHREVLKELDDLVREVEKILRDNIETLRRILEKIRRILERVAREKDDKRLLDLLRDLLRLLKELLETLEKLNERTLKLLRDLLRKLKEALRRNLKLLRELVDEAAT

SEQ ID NO: 13573 - protein, 241 aa, Artificial Sequence; identical to SEQ ID NO: 13572
  Synthetic

SEQ ID NO: 13574 - protein, 237 aa, Artificial Sequence
  Synthetic
SKDEIIKRIKDELEKLVRDVERLLRESERRIADLVRRVREILEESKRRVDELVKRVKETGNTEELIKTIKDLLRRNLEKLRRIIEEIKEVLRENNELVDRTLKRIKDLLRELLEMIRRAEIDEERLRELEEILRRVLDTLRRLAEELHETSKRVLEELDRALREIEEIHRRVLKELDDTGDVETILRVATEVVKESATVLKRILETLEEALKRNVRIIEEMLEILREVIERIARKLK

SEQ ID NO: 13575 - protein, 237 aa, Artificial Sequence; identical to SEQ ID NO: 13574
  Synthetic

SEQ ID NO: 13576 - protein, 230 aa, Artificial Sequence
  Synthetic
SEEEILREIKRLLEEHLELNERILREIKKDNKRTLKELRDIVRELKEILERIKRRIRIKSEKAKEVDKIIREVERRIDEVLKEIERLIREDNKKLDDVHEESEREIRRVIKDADRTDDLKTVVDEVRKVVDRDLKLLEELSESNIRVLEEVLRLLEELLRILEEVLKEILKASESEELRKLLEDARRALERILRRLAKIVKEIKEKHEEVLRRLEKSVREIDERLRRARE

SEQ ID NO: 13577 - protein, 230 aa, Artificial Sequence; identical to SEQ ID NO: 13576
  Synthetic

SEQ ID NO: 13578 - protein, 247 aa, Artificial Sequence
  Synthetic
SELERLERLLKEIVEVNRKALEDLRRVLEETVRRDREVLDRTRRKLEEIAEEILRELKNVKEVRDAVKELEETLREVVRRSEELLERLREIVDRVVKEVEDSNRETEKKLRDVVDAVRRGRDDKTLVAEVIEVILRDLKRNLDLLERLIRVTVEVLERSLELIKRVIEVLRRVLKRVLDIVRERRKERREDLKRLEDLVKRIEEELRRKLEKYERELRDLKRKLEELLKRYEEKVKELKRKLDEALK

SEQ ID NO: 13579 - protein, 247 aa, Artificial Sequence; identical to SEQ ID NO: 13578
  Synthetic

SEQ ID NO: 13580 - protein, 238 aa, Artificial Sequence
  Synthetic
SEEEILRRIAEEIKRLIDEDLRLIEELVRKIKTVAKRDLELIARLVEKIEEVIRRSIRVEEVVRELKKKLDEILKRVEDVVRESKKRLEDVRRKVEEAVKKSKEEIERILRRAEEGTDKKKIVEDLERVLKDHLDMNTEVVKDLKKILDDHLDANREVVKRLKEVLDDAVRVLRERIEDEEELKTAEKIIEDIKKEIDDVHREVRRLLEEIKEDIDRVNEEVKKRLEDIIEKIRRAAK

SEQ ID NO: 13581 - protein, 238 aa, Artificial Sequence; identical to SEQ ID NO: 13580
  Synthetic

SEQ ID NO: 13582 - protein, 245 aa, Artificial Sequence
  Synthetic
SIEELAEDIKKILDDALELLERLAKRAKEINDEILDELRKLVEKNKRDLDRALEKLRREGIPKEVLDELEKAVEDLKRDHDRVLKDLKKVADENKKTIKKVLDDLKRIIDEVKRMIEDLLKRLEDSKRVLTEILKVLKRLVEEIAKLLERLLESDKRVIEEIIKLLEDLNRALEELIRIIAEKIEDTERVRKLIRELEEELKDNRRLIEELVRRARKVNKRLRELVEEVIDRLRELLERIEEKIR

SEQ ID NO: 13583 - protein, 245 aa, Artificial Sequence; identical to SEQ ID NO: 13582
  Synthetic

SEQ ID NO: 13584 - protein, 234 aa, Artificial Sequence
  Synthetic
SKEETLRKEAEDLLRRLEELTRRLEKKARELLERAKKLSRDLAEELKRLLKELREKDVPEELIKVLEEVAKTSIDLNKEVIDVIRRVIEESLELNKRVLDVLRRVLDIAARKGRDKKAIRDVVREAARVIKEVIDEDEKVNRDLKRVIERVIDDDRKALERLRKAVEEVASRLDDERLKRLVEELLKAVTDLSRKNKRILEELLKAIETLSDENKKILTEILDALRRLVEKIEK

SEQ ID NO: 13585 - protein, 234 aa, Artificial Sequence; identical to SEQ ID NO: 13584
  Synthetic

SEQ ID NO: 13586 - protein, 241 aa, Artificial Sequence
  Synthetic
DEERKIVETLHRTSREVIKTLEKIVRDLKEVLKKNLELTERLIKRVHEVSREILRLTRENKVDEKDLERIHRELEKEIREVLEKSERDARDLLRKVERAIEELRERHKRVLEDLRRKGVPEELIRIFADLVRANTRVLETLLRILKELVDRSRDVLRKLIEIVEELARMNKEVLRKLKERDDDRVKKELEDANREVNKKLEEVLREIRELHKRVLDRLDEVLRRVEEINKRVNERLDRTAK

SEQ ID NO: 13587 - protein, 241 aa, Artificial Sequence; identical to SEQ ID NO: 13586
  Synthetic

SEQ ID NO: 13588 - protein, 242 aa, Artificial Sequence
  Synthetic
SEVEDLKRKLEEDLERHKKDVKRLKDEAERRLEEHKRLVEELERRIKKLLDELKDRNPEVKELLRVVKEIVELIRRVLEKHLKLLEEIIRLLATVLDKHLDVLREIIRLIARVLDLKEAGLDEEDLKREAEDIARKAEELLRDSARTAEDIARRAEEALKESKDDLKRILDRARELLDDIRRKKVVPKDVLRDLERILTELAKALKDLIDNSRRTLEKLLKALRDLIRESKETLEEVLRRTD

SEQ ID NO: 13589 - protein, 242 aa, Artificial Sequence; identical to SEQ ID NO: 13588
  Synthetic

SEQ ID NO: 13590 - protein, 240 aa, Artificial Sequence
  Synthetic
KEREEVKEKLDRLLEEVEKTVRELKREHDELLKEVEKLVRDLKKEHDELLKKVKDDGVPKEILDVIREHVRTNKEILDRVLEVVEEHLRRNKEILDKLLDDIRKVVEDAKRILEIDDDETLRRAVRRILEELRKLVEDIRKKVKDSLETLERALEEAEERIRRSLEDLKRVLKEAKDKTKDKDRLDKVEELVKKLLEDTKRTVDRVRELVRKILKKSRETLEELERLIEKILRELEKDAR

SEQ ID NO: 13591 - protein, 240 aa, Artificial Sequence; identical to SEQ ID NO: 13590
  Synthetic

SEQ ID NO: 13592 - protein, 240 aa, Artificial Sequence
  Synthetic
SERETVKRRLEELLKEVKRTLDKLKEEHDRLLEDVRRVVEELKREHDKLLKEVKDSGVPEELLRVIAKVLETNKRILDDLLRVVKKHVDLNKEILDRILEMIKEIVERVKRVLEDDDEKTLRDKIRDIIRRLEDAAREAEERVRRSLEELKKAVEKIRKKIEDSLRELEEALKRVRDKEEDDKRLEDISRLVKRLLDESRRVLRELEETIRKRAEESKRVLEEVKRLVEKLIRELRKEAE

SEQ ID NO: 13593 - protein, 240 aa, Artificial Sequence; identical to SEQ ID NO: 13592
  Synthetic

SEQ ID NO: 13594 - protein, 239 aa, Artificial Sequence
  Synthetic
SEDEIIKKIIEDLRRVLKEVEEIHKEVEERLDKVLKEAEEMHKEVLKELDRVLDEVKRIEDVETVLRLAIEAVRRALEIVRKVTEDLIRVVRKLLEIVDRVNKRVKKAVEDVLKLLRDTLKGSKDVERVLDEARRLLEKLHRDSRRILKRIKELLDELKELSERILERIKRLLEEVERRNSDDERLLEELIEELKDLIRRHIELLRRLIERLKELLKKHIEDLRRLLEEIEKLLEEARK

SEQ ID NO: 13595 - protein, 239 aa, Artificial Sequence; identical to SEQ ID NO: 13594
  Synthetic

SEQ ID NO: 13596 - protein, 241 aa, Artificial Sequence
  Synthetic
SREDEVRKVVEKVLRDSKRSMKELRDVVTEVLKKSKEVLRELKEAVDRVLKKLKDISRDVKSSDVVRELLRVLEELLERLARVLEKNLRINEELLRRLERVAEKNLKINKDLLKALADAERSEEAEKLLREYKKLVEDLARKLRRLLDEYRKLVEELEKRARELLEEIKRLIEDIKRKLERDGPSEELVKELLEFLKRVLEKAERLVRKNLEDNKELLERLERLIEENLKLLEDLLRRTEK

SEQ ID NO: 13597 - protein, 241 aa, Artificial Sequence; identical to SEQ ID NO: 13596
  Synthetic

SEQ ID NO: 13598 - protein, 251 aa, Artificial Sequence
  Synthetic
SEEEKLRELKEILDRTLKKIEDLIEESKRLNEEHVRLTREILDEIRRLLEELLRKLREAGIRDEEIETVFKEIKELLEEVLRRNEDSVRRIRKAHEEILRKLEEIAKRIRKLLDDVLRLLRGGRDRKDVLTDLLRVIKEALDALKKVLDDLHRVNEENVRLDKESLDRLLEVIDRAIKKIKKILKKAEERLSEEILKRIEDTLKRLKEELKRLVDEVRKHIEELLERSERLIRELRRTLEEILKRLKEKTD

SEQ ID NO: 13599 - protein, 251 aa, Artificial Sequence; identical to SEQ ID NO: 13598
  Synthetic

SEQ ID NO: 13600 - protein, 245 aa, Artificial Sequence
  Synthetic
SAAELVLELLARVVKLLEEVLKRLIDLHRDVLKKIKDVLDRDHELHERVLRELVKVLREAERRDEETVRRLLEEVRKAIERVLEESKKRLDEVVKDSRRVLEEVKELLRRVEEDIERVLREVKRSNNVEERILRDLEELLRRLIELLRRLLEEVRKINEEIIRLLEKLLRRNAEILRTLLRLAERDIDKREELEKRLRETLDEHRDLLRKLKEFLDRSLEDLERRVDEVRKELERVLEELKRKLK

SEQ ID NO: 13601 - protein, 245 aa, Artificial Sequence; identical to SEQ ID NO: 13600
  Synthetic

SEQ ID NO: 13602 - protein, 239 aa, Artificial Sequence
  Synthetic
KEVEDIERVLRKALELSKKVSDDLERVLRELLKLSKEVIEKLVRVLEEILELLKRENIGEDELLRRLEKRVRKIIRDAERTLEETKRELDRIIEESRRLNKRTAEDLKKLIDDVKRTRNDEEAIERLVRLIEKNLRLLEELVRRLSRLLEENLRKLEDIVRRIKELIKETLKLLEDAGVPEEDLRRVRELIKKVLKDLERVLKEAEDLHREVLEKLKDVVRRAAEMHEEVIRALKEVSR

SEQ ID NO: 13603 - protein, 239 aa, Artificial Sequence; identical to SEQ ID NO: 13602
  Synthetic

SEQ ID NO: 13604 - protein, 240 aa, Artificial Sequence
  Synthetic
DEEELLREIKTILDESLKALEELIRKIMRILDKSLKDLEEIVREIKKTIDELLEKVRRSGLPEEVLKKVKRVAEKVKEDIDRLLEDVERSHREVKKKLDELLKEVKRSHEEVKKELDSLRRDSDRDTVAREILRVLKKNLDVLREVVEKIVKVLEDNLKSLKRVLETLVDLLRKLIKVLREAGLREEALDDLRRLVKELKDKLRKLLKDYKDLLKELKDEAKKLLDDYRRLIEELEKKAR

SEQ ID NO: 13605 - protein, 240 aa, Artificial Sequence; identical to SEQ ID NO: 13604
  Synthetic

SEQ ID NO: 13606 - protein, 236 aa, Artificial Sequence
  Synthetic
SEKEKLDELRKLIEEIERELDRLLEDNKRAVEKVLRDLDRLLKKSEDDVRRVEEELDKDRVPEDVKRIIRRLLEVHREVLELVKTVIRRNLKVSEDLIRKVKEAVRELLEVIEKLKSREVLKRIREIIEKIKEILERALEESKRSIEEIKRIIETVDRRVKEIIKEVRDVIRRDVKDKDLAERIRKILDDLLEVHERVARAIEELLRELLEKNEEIVRTIKKLLKRLLDTLRKAAE

SEQ ID NO: 13607 - protein, 236 aa, Artificial Sequence; identical to SEQ ID NO: 13606
  Synthetic

SEQ ID NO: 13608 - protein, 235 aa, Artificial Sequence
  Synthetic
SKLETVIRILEELVKVHEELLRIVKKILEELVRVHRRVSEENLRLWKELLDALREDKGREDERVERIIEKAERLLREVAKRHEESIREIDRLLEEIARRAEESLKKIRDLLRKVKELAERGDSEKSIEDLVRTLIELHRRSVEEIRRLLEELVRIHRESIKEVEKLNEDESRELRKAGISEELLKRVEDVNRESRKVLEESLRRVEEALEKIERALRKSEEDIRRLMEDIKRVLK

SEQ ID NO: 13609 - protein, 235 aa, Artificial Sequence; identical to SEQ ID NO: 13608
  Synthetic

SEQ ID NO: 13610 - protein, 236 aa, Artificial Sequence
  Synthetic
SREEKIEKLIRLVEELLERLRELLERNAELIKRLLDRLRELLKELERLNEELLKKLLEKVDDEDLRRVLEEVKKSLEEVREKLERAVKEVKRLVDESRESAREVVKTIRDLLRKVRESEDKRDVVRVIEDIARLLDEILKENRRVNEEIVRLIRDVLRVIREVVKTNADLLREILRRAGGVRELEELIKKVERDHERVIKEVEKLVKELLDRSEEIHKRAKELIKEVLDRVREAAR

SEQ ID NO: 13611 - protein, 236 aa, Artificial Sequence; identical to SEQ ID NO: 13610
  Synthetic

SEQ ID NO: 13612 - protein, 237 aa, Artificial Sequence
  Synthetic
SREELLDRILEAIAKILEDLKRLIDENLRRLEEVVRELERIIDRNLKLIREILDELKKRGAREEILEKIKKVDKELEDLIRRLLKKLEDLIRETERRLREILKRIRDLLKEVKDRDKDLERLLEVLEEVLRVIKELAKELLDSLRKVLKVVEEVLRLLNEVNKEVLDVIRELAKDGEGDEIIRKLDELLKEVEKVHKEVKDRIRKLLEDHKRSLDEVKKKLERLLERAKEVVEREKK

SEQ ID NO: 13613 - protein, 237 aa, Artificial Sequence; identical to SEQ ID NO: 13612
  Synthetic

SEQ ID NO: 13614 - protein, 246 aa, Artificial Sequence
  Synthetic
SEREELLERIKEILKRVKDKLDEDLKRLKEILEKLKEKADRDLEELRRRIEEVREKLERTGRTDELVKEVLDTVRRNLENLKRLVEDILRKLEENVKNLTDLVREILKLITELIKRLEDGGLPKEVLDALRRVLEKLEELLREILERLKRSLEKVKRKIEELLKELERSLDELRRALERIRKEIKDSETAVRAIIRVLEKHLEAVRRVLEELLKVLAEHLETVRELIERLKRVLEEAIEVVERVAR

SEQ ID NO: 13615 - protein, 246 aa, Artificial Sequence; identical to SEQ ID NO: 13614
  Synthetic

SEQ ID NO: 13616 - protein, 240 aa, Artificial Sequence
  Synthetic
DEERKLKELLDRLRENIRALRELIKDNLRLLKTLVDALEELLKDNLRLLRELAEEAARRLSEDALRDLKRVLDELKKVHDRVRRELERVLKELDEVHKEVKERLDRSLEELEDVIRKVKDERALLEALKKHVDVVRTVLKLLLDANKRALDVVRALLELILTVNKKAVDVLREILKRVVKNEKDVRELIKRVETALRESEEKLRRVAEELKKALDRSRKDLEEVVRRTEDLLRRLEEKLR

SEQ ID NO: 13617 - protein, 240 aa, Artificial Sequence; identical to SEQ ID NO: 13616
  Synthetic

SEQ ID NO: 13618 - protein, 240 aa, Artificial Sequence
  Synthetic
SEEETVRRLLELLKENIEELRELLKRNLDLLRKLAEELKKLIEELARITERLAEKLAKDLSEEVLKELEDVLRELKRVVEEVKRRLKKVLDELREVHKELKKELDKSLEELRKKLEEVSRKEDLTRALADHVRVVKEVLDKILEVNRKFLEDVKDLLRLLLEALEKALKELERLLRRVVDKEEEVRKLVEELRRAVKRVRDLLDELRRRLEEALRKSKRELETIEERTRRLLEDIKRDLD

SEQ ID NO: 13619 - protein, 240 aa, Artificial Sequence; identical to SEQ ID NO: 13618
  Synthetic

SEQ ID NO: 13620 - protein, 242 aa, Artificial Sequence
  Synthetic
SEEEEIVKRLKELIKRNLELLDKTLKELKKTLEDIIRTLTELVKRAKEINKELIDRLREKGVREEAEKKLRRSDEKLEEVVRRVKEKLKRALERLEEAIKRAKEKIKRSIEKLDKLVKDLRSEEMKRALKEVIDEHIKILRDIIRLLEEVVETIIRVLREAIKLLEELVERNIRVLRDIVRADKLEREDIRRYEEKLRKLVEEVKKKLRDLEERLRRLVEKIRKLLEDSERRLRTMLDEIRR

SEQ ID NO: 13621 - protein, 242 aa, Artificial Sequence; identical to SEQ ID NO: 13620
  Synthetic

SEQ ID NO: 13622 - protein, 246 aa, Artificial Sequence
  Synthetic
REKEEKVKKVREVVTELKRELDDMLRRVKEAHERLKKKHDDLLKEVREVHKRLKDRLDERGGDEAIKEVLDRHLKLVEEVVRANKEVLDRHLKLVEDVLRALKEVLDKVLKLVEELVRRRDEERAEDLVRRVVKEIDKLVKEIRKRLEDVSRDVRRLLDELRKINKRVSDEVKRLIEELRKRLSGGDEEIKKTIEEIIKVLRELNDKLRRLSEDTIRVLEELNKEIARLLEKLVRDTKRLLDELTK

SEQ ID NO: 13623 - protein, 246 aa, Artificial Sequence; identical to SEQ ID NO: 13622
  Synthetic

SEQ ID NO: 13624 - protein, 247 aa, Artificial Sequence
  Synthetic
SVKEVIKEVLDRVVKLIKDVIDALKTVLDRHLRLNRENIRALLEVLERILELLEELVRKSTDDRAEEVLRRVVTKIRELLERIKRESDKVSEKVRRLVEEIRRILKEAVDRIKKLVEELRKALEGIREEIADKLRKIEKKIKRILEELRKMLEELARTIEKLNKDDEDTVRKTVETIERILEEETRSTDDLEKLLRKVRKIAKELADELRKLHREVKETHEDLKRKLDKLLKDIRKVVEDIKREVDR

SEQ ID NO: 13625 - protein, 247 aa, Artificial Sequence; identical to SEQ ID NO: 13624
  Synthetic

SEQ ID NO: 13626 - protein, 233 aa, Artificial Sequence
  Synthetic
EKEELVEEILRRLKKMSERFSRVVEEILKLLEDSSRKVEEAIRRTIRELEKTLKRVEKDGKTDELLRDLKRVVEDIKRKLEELLRDHRRILEEIRRKLEELHREHKKILEEISRRLGTEDELARLIIEVLRKNNKALRDAAERIREVLKENHDALKKVVEDIVRVLEEALEVLTKLDSRELREAVKKVIADLEKILKDLRKLDKESLDKLREILKTLRDLDRKSLEELEEIRR

SEQ ID NO: 13627 - protein, 233 aa, Artificial Sequence; identical to SEQ ID NO: 13626
  Synthetic

SEQ ID NO: 13628 - protein, 245 aa, Artificial Sequence
  Synthetic
SREEKLREDLDRVFRKNEEELKRVEKEVKKLLDDSKRKLDEVKKELEDLLEKIKRLLDRPGTAELVERLIKELKDTLEKLADLVRDANRLIKELLDRLRELAERVNDDTRKTLETLERTLDKDDVIRKLREDVTRVNDENRRVVEKLDELVRDVNRRNEEVLREAKKRIDEVIRELEEIKRDRKDDEELLRALKEVVRKVIEIVRRLLELHRETVKELARVIKEILRLHLESIKKLLDVVREVLR

SEQ ID NO: 13629 - protein, 245 aa, Artificial Sequence; identical to SEQ ID NO: 13628
  Synthetic

SEQ ID NO: 13630 - protein, 237 aa, Artificial Sequence
  Synthetic
DEEEKVRRLKELLDRTLKKLKELVEEHDKILDELLKKLEELVRRHNKLLDDLLRRVEERGLDEEVLRRLREVVERVKRENRKVLEDIRRVVEEVKKKNRDVLKKAEDVIRKVKEDADRSRDKRMLVRLIEEVAEVLKDLLRLLKESDEEVIDALRKALERLERSSEKLAKVVRDVIREENLEEELEDTVRKLLETSKKLLDEAREVLERLHRRSEELLRRVEETLRRLEDEVRKITK

SEQ ID NO: 13631 - protein, 237 aa, Artificial Sequence; identical to SEQ ID NO: 13630
  Synthetic

SEQ ID NO: 13632 - protein, 237 aa, Artificial Sequence
  Synthetic
DKEDKLRKIKELIRKLLETIKRLVEEHDKELDETLKKLEDLVREHDRLLDETLKRLEERGLPEDVLRELKKAVEDVKRKNKRVLEEAERVIRDVKRENKEVLRTLKRVVEEVEDALDRTRDDKAVEDLIRKLIEALKEALDRLRRSDEKVVEVVRRLLKLLKDSSKDLADVLREVIRKTNEEEELERDLERLEKTSEDLLRRVKEEIDRLHERSKKLLDEARKKLEELLKTVKDIAK

SEQ ID NO: 13633 - protein, 237 aa, Artificial Sequence; identical to SEQ ID NO: 13632
  Synthetic

SEQ ID NO: 13634 - protein, 238 aa, Artificial Sequence
  Synthetic
SEREELARDLDDLRRRLREAAEELKKKHEKLRRELEELAKELRKRHEELKKELDDAARRGEPSEDLVRRIEEVIDDLHEKVRKIIEEIKRALDKLNEDVERLIREIKRVLDELLDKVRRRGLPKDVLKRLEDVLREIKEELDRVLKEHKETIKKVKDALDEILREHEEVVKKLKKELRDSKEEEVLKRILDKLMKVSEDVLRKLEDLLREVIELTKKVLDLLDELLKRVKKVLEEVMK

SEQ ID NO: 13635 - protein, 238 aa, Artificial Sequence; identical to SEQ ID NO: 13634
  Synthetic

SEQ ID NO: 13636 - protein, 240 aa, Artificial Sequence
  Synthetic
DREKKVRDIEEDLKRVLDKLRRRVETSKEELKKVLKRDKENADELEKTLRDVVRELDRKIDSEVLRAVREIVKRLVEVVRRYNELSEKIIRDLVRVNDRVLELLKRIVKRLIDVVRELEEIEDKEKALRRLEEVVKEVKRRIEELLKELEDVHRELVKILEEVNEDLKRVATEVKEIIKTIIKISEVAKELDEVIKRLLDNLKENTDRLKEVIDRNLKDLRDLAEELRRVIERLLEDARR

SEQ ID NO: 13637 - protein, 240 aa, Artificial Sequence; identical to SEQ ID NO: 13636
  Synthetic

SEQ ID NO: 13638 - protein, 238 aa, Artificial Sequence
  Synthetic
DKEEVLKDIKRKLDDHRRRTDEIVERLERLLKEHEEKTRRLLEDVRKKLEELKEIIKRKEQSEELLIKSVEELLRETKKILEDLIRHLDELVKRILDILRDLDRHLEELIRDTKRILEEGDAEERLLKKLEELLRRLLKRNKEALERLKRILEELLKRNRDALKRAEDELRKVLEDLRRRPEEEVLKRILDRIEELLRRLVKVNTDSLRELKRVVDELVKVDRESLRELERVLRELTK

SEQ ID NO: 13639 - protein, 238 aa, Artificial Sequence; identical to SEQ ID NO: 13638
  Synthetic

SEQ ID NO: 13640 - protein, 241 aa, Artificial Sequence
  Synthetic
SKEEEIVRELEKILRDHLRKVERIVEDLEKLLDDHLKKIEELAKRLEEIIREAARKLEEKGVDDKVIKKIRELLREIEEELRKVLEDVRRLHKKLREELRRVVKRIRDLHKRILDELRKDTREDAIRRVLELIKKVSREILELVKRVLEALRRISREVAKLLRRVLETIRRVLEEVVKEVEDEEVKELLKRVEKLIDDVRKKVEDLHRELEKALRDIDRKVKRLNEELERLVEEVEEKVKT

SEQ ID NO: 13641 - protein, 241 aa, Artificial Sequence; identical to SEQ ID NO: 13640
  Synthetic

SEQ ID NO: 13642 - protein, 233 aa, Artificial Sequence
  Synthetic
SESEELRRKLEELEKELRDVLTKDRKMLEDLKRRLDKLVKDSERRIRELKRRLDEKIKDEDVKRVITRLVEEIKRVNEEVKKALEDVLRELRKVSEDIARLLKRVIDDIRRVLEELDRTTDKETADRLLKRLKEIIDKVREDVKRLNDKLRELVDRVRKRVEELHTRLRELLKKLNLPREIVEELRKVIEDHERLVREILELLRKAIDDNHKLVRDLLERLKRALDETREDRR

SEQ ID NO: 13643 - protein, 233 aa, Artificial Sequence; identical to SEQ ID NO: 13642
  Synthetic

SEQ ID NO: 13644 - protein, 241 aa, Artificial Sequence
  Synthetic
RETEETLKKLEKLLRKMLEVSKRLNEEDEKLLRTKRKLIEDLLRRVEELLEETRRVVSNTTDERVLRRADEVLDEVRKIVEDVERAVEEALREVERVNEEIIRKNEELVERVKTVLERIRRIREKEKILRALKEVVEILKEALEENLKAVRKSIEIHRKVIELLVRLVERIVKILREILEEVVDDKDLVETLKRKLDKLLRDIRELAKDYKRKLDRLLEDVERLHRELKKELDELLKEVKD

SEQ ID NO: 13645 - protein, 241 aa, Artificial Sequence; identical to SEQ ID NO: 13644
  Synthetic

SEQ ID NO: 13646 - protein, 245 aa, Artificial Sequence
  Synthetic
SELEKLLTDLERVIRKVVEDLRRLLEEHKKALDEDKKRDEDSNEELADAIRKVIEKLKRTTDEEIIERALRELLKVATEVIKKNIESNRESVKVTRRVIKDIVEVVKRLIDVLRKVIKEIVRRDPRRDKAEKVRRLVEELARRLEELLREIRKLLEDSTRKVERLNEEVERLLRELAETVKELTDKRAREEDTKRLLEKIHDDHRKLVEENERLLREDHKTLEDLIRKIKKLAEEILELTARETK

SEQ ID NO: 13647 - protein, 245 aa, Artificial Sequence; identical to SEQ ID NO: 13646
  Synthetic

SEQ ID NO: 13648 - protein, 240 aa, Artificial Sequence
  Synthetic
DEREVLKEILDLVRRLLELALEILKRSLELLRRLAEEAKKVLDRSVELLRRLVREAKEAAKNPDERVKREVVEKAERVLEESKRRLTEVLERIKRVLEESKRLIKEVLDRIRDVIRRVKERRGEDKDVKKLLDLLRELLRELKELLEDHLRIIEEIIEKLKRLIDEHLEILKKILDRLRREGITDELVKEVEDRLRESEKKLERLLEDVERLLRENEERLRRLLEEVERLLRELAETLER

SEQ ID NO: 13649 - protein, 240 aa, Artificial Sequence; identical to SEQ ID NO: 13648
  Synthetic

SEQ ID NO: 13650 - protein, 241 aa, Artificial Sequence
  Synthetic
SEKEEVEKRLKKVDEDTKRAVEEVKKAIEEVLRRHEEASKRVEEAIRRVLKELEDLKEDESVLRRVLRMIEEISKEHIRVLEETLKLIEEIVKKVLDVLREDLDASREVVERVERAIKDEKTLRELREILERHERLMEEVLRRLEKLLEEARKFVERVKRENKKLLDDARDVIRRLEEARRDVDREELLERLKELIKRLLEALKRLDEEVSKLIDELLKRLEKLAKEVLDLNRELLERTRR

SEQ ID NO: 13651 - protein, 241 aa, Artificial Sequence; identical to SEQ ID NO: 13650
  Synthetic

SEQ ID NO: 13652 - protein, 244 aa, Artificial Sequence
  Synthetic
SDEERLDKVLKEAEDIIRELERLLRESLETLKRLIERLEKLLRDSLEELRRLIEDLARKRVPKEILDRLLTVHEETLRLLKEVLDKLLEVHKEILDELKKILEKLLRAVEEILRRLKKIRRERELEEVLKRLKKALEDIKRELEEVLRRDEEVNEEAKRDLDRIVERNERANREIEEELRRSNVPEDVVRMLKEVSRRDEELTRRLLRMAKKLLEDNEELSRRLVKKLDEVLKRVEEIIKRETD

SEQ ID NO: 13653 - protein, 244 aa, Artificial Sequence; identical to SEQ ID NO: 13652
  Synthetic

SEQ ID NO: 13654 - protein, 246 aa, Artificial Sequence
  Synthetic
SREERIRKLAEDLKRKIEELLRRVRKLAEEHKRLIEKILEESERLAEELKRRAEELKKRLDKEEILRVVDKLIKILKKLVDAHRRSLEKHLRVVDELIRRIEEVLKKLLEILDELIKLLENRDSKEVERVLREVLEKLERVIRELEKLLREVLKASEDISREDMKAIRDVLEDLKRVLDEIRKKGVPKEVLDELRRLLELLKKLVDRLLELNKRLNDHAKKLVEDLLRLLKKLLEEIKKLVDDARR

SEQ ID NO: 13655 - protein, 246 aa, Artificial Sequence; identical to SEQ ID NO: 13654
  Synthetic

SEQ ID NO: 13656 - protein, 236 aa, Artificial Sequence
  Synthetic
SEEERLEEEVRRELERYRRTVRRLAEEVKEELERYEREVKKEEEKLEKTLEDLERELTRDGLDRESAKETLRKLREDIRRTLKKNEDLLRKIEKRIKEVLDRNEEMLKRIKELVDRGNLDRDKLERIERLIKRLRELSKRVAEELERLIRELRKLNRRVLEELDRLLRELEDRLRKTEDKKTIAEELKRVLRELTRILRELVKLNSDVVRRLLEVLTRLAKLSEDVVREILEIERE

SEQ ID NO: 13657 - protein, 236 aa, Artificial Sequence; identical to SEQ ID NO: 13656
  Synthetic

SEQ ID NO: 13658 - protein, 245 aa, Artificial Sequence
  Synthetic
SEEEKLETVREELRRALERIEELITKNEKKIEDTLRDIRREIEENARTVKEALERIKKDGVDREDLKDIKRRYDEMLEKLKRELDEIVREIKERHERLRKELDDIVKRVEEKLRELRKKPNSEELIRELLEIVREALERIRRLLKKLLEANERLLKRIRELLDELLKANDKLVKDLEDILRKENMPKEKVDRTKEELERLKKEHRERVEETKRKLDELKKEHEREIRKTETDLRRLLKELADRAK

SEQ ID NO: 13659 - protein, 245 aa, Artificial Sequence; identical to SEQ ID NO: 13658
  Synthetic

SEQ ID NO: 13660 - protein, 247 aa, Artificial Sequence
  Synthetic
SEDEKLRKLVEEVERTLKKLIDYLRENVEDVDRILRRLKELIDRHLKKVRELIEKLLRGGIDRKELRDLKRRVEDLHRKIREELKELKKRYKELIDRIKEDAERILKEAKRKIDEIEKLDDDRKSLLKALEEIVRDLVRLIRELLRKLKEINKDLVKAIRELLEALLEIHKRIVDAIRDIVRRELREDKDTVREIEKDLEDSKRELERIKEEIEELLKRLEDKNERAIEEIEEDLKRLEERLREAAK

SEQ ID NO: 13661 - protein, 247 aa, Artificial Sequence; identical to SEQ ID NO: 13660
  Synthetic

SEQ ID NO: 13662 - protein, 248 aa, Artificial Sequence
  Synthetic
SEEEKLRKTEEDLKRTLEELKKILDDHLRIIERLLREIKRVLEENKRNARRLLEEIKRSGLDTEELKRIEEEYKRRLDEILRELRELVEEAKRLHDRIKEELDELRKRVKELLERIRRSDRDRKELLKELEDVIKEAVDAVRRLLDELRKVHKRLVDAVRRLVEKLKRINKRLVDLIREILEKMKKDLDERVLKRLEKELRDHLKRLEEIIKRLEEDLKKTLDELKRTIEDAERKLRDLERKVKEDAK

SEQ ID NO: 13663 - protein, 248 aa, Artificial Sequence; identical to SEQ ID NO: 13662
  Synthetic

SEQ ID NO: 13664 - protein, 246 aa, Artificial Sequence
  Synthetic
SILERLVRELIRLLRELLRIHKELVERVIRVLERLLEVHKKLVETIERLLDKLAELVRRGLPEKDLKTEIDRVKTELERVLRETKEEVKRLIEEIKRLEDDSRRRMKELVEEIERLIRKLEKDGTEPREKLKRAADEARRLLEELKKLHETSIDETRRILEKLKRVHEELEERTRRLDKRLEELARRGSDKREIEKVLREIKEELRRSLRELKRVLDEVKERLKESLERLRKLIEEIKERLDRIRK

SEQ ID NO: 13665 - protein, 246 aa, Artificial Sequence; identical to SEQ ID NO: 13664
  Synthetic

SEQ ID NO: 13666 - protein, 252 aa, Artificial Sequence
  Synthetic
SLEEITKRLLELVEENLRRHEEILRELLELAKRLAKEDRDILEEVLKLIEELLKLLEDNTSSEEDLKRLLKEVIEELRRVVKRVKDKWDEVVKRIEDLVKKLKELHDDTLRKLRELVRKIVTDIREKGGEAEKVKRVVEKILELVERLAKVVKESVEKLLEILRELAEVSKRVAEALLRLLEELVRVIRIKDERTLREVVRKVLEEAKRLLDELEEVHKRVKKELEDIIEENRRVVKRVRDELREIKRELDE

SEQ ID NO: 13667 - protein, 252 aa, Artificial Sequence; identical to SEQ ID NO: 13666
  Synthetic

SEQ ID NO: 13668 - protein, 247 aa, Artificial Sequence
  Synthetic
SKIEEVLERAKEVLDRLLDLHRRLVKEIEDVLDRSNELLDRLLKELEKVLDELLDIVRRRSSEEVLEELRRILETLARRLDDALRKDKELVDRLEKSLEDVLRTSERIVRKLEKELEDVVREGAVRKEVVEAIVRLLRELVEINREIVKRIVELLREHNRASRRLVEEIKRLLKEILDVARKIVERTSEEALKELKERIEEIKKTLRELLKELKKLNREIKETIKELSERLARAVEKIKRELEKLRK

SEQ ID NO: 13669 - protein, 247 aa, Artificial Sequence; identical to SEQ ID NO: 13668
  Synthetic

SEQ ID NO: 13670 - protein, 241 aa, Artificial Sequence
  Synthetic
KAEEAVEKLVRIARAIVKINEDLSREVVRILREIVRLNEETTRLLVEIAREVVKVVEDAGLSEDVVRKLRKLVKELEDLLKKSNDDIRKLVEDVRRRLKESNDEIRRLVERLEELLKRLPDDEELLRLVEELTEELLRTHEEVVKALEKLTRDLLELHRELLERVRRLTKRIEEELKRVNVSEELLRRLEELRKRLEKVLDDSRKELEKLKRELERLLEESRRKLEKLKRDLERVLEETRR

SEQ ID NO: 13671 - protein, 241 aa, Artificial Sequence; identical to SEQ ID NO: 13670
  Synthetic

SEQ ID NO: 13672 - protein, 243 aa, Artificial Sequence
  Synthetic
DDRRILKLLIDIIRKLVKLNEETADKLIRVIDELLKMAEESLKKVIDLVRTLVEIIRRERGKRDLERVLRRIKEEMERIKREHEEALKEIEERLKRIVDEHERLLEEIERELREVEREADDKPQSERVKRLRERLRRILKEILDVSRKVLKDLKDLADEILEDSEEILKELERLIREILKVTAETDDRKVVEELLRKVEKLIKDIRERYERLVKKVRDLVERWKELVRRLLKKAEDVIREIEK

SEQ ID NO: 13673 - protein, 243 aa, Artificial Sequence; identical to SEQ ID NO: 13672
  Synthetic

SEQ ID NO: 13674 - protein, 236 aa, Artificial Sequence
  Synthetic
DEEDALRTIEELVKRVNEENKKILDESEDLVRRLNEKNERINKESRDLVKKLREDAEDLDDEELVKKIIDVIRRNLELNRRSVKLVIEVLERNLELNEESIRLVLKVLEEILEILRETTRSEKLKELEKIAKRIIEEIRKALEEAKELNKRIIERLEKVLREIEKLNKELEDLVRRKGAGDERVLKLVEDAAREDERLNRELDRATREVAEEDKKLNEDIDKTLNDVIRELLEAAR

SEQ ID NO: 13675 - protein, 236 aa, Artificial Sequence; identical to SEQ ID NO: 13674
  Synthetic

SEQ ID NO: 13676 - protein, 240 aa, Artificial Sequence
  Synthetic
SSVETIKKLVEDARKKLEDSIRKIEKLVRDVEKTLRDSLKRIRDLVEKVVRTLRELLREPKTEELLRRTRKLVREVLERLKKINKEVLDILKKVLEDLERIDKEVLDLLRDIIKKLEDMNQVDEKVIRRLRRLAEEIEKRVEDINRESRKKADDIRRKVEEINERSDRAAKEVEDEARRNDSDLEELVKRITDILREHVKMHEDLIRAIAKVLRDHVEAHKRLIKRITEILEEVVKAVTD

SEQ ID NO: 13677 - protein, 240 aa, Artificial Sequence; identical to SEQ ID NO: 13676
  Synthetic

SEQ ID NO: 13678 - protein, 242 aa, Artificial Sequence
  Synthetic
DTKEEIKKLVEELLRLIEELIKRTEELNKEDNEIAERVVETHSRILRDLLRSLEEVARTRDKRVVKTLDEKAREVVKTSDKLVDEWRERSERIVEEAERLVRKLEEDVRRVIDEIRRLTQREKLKKILDELKRLLEKVIKLLEELIRKHLELAERVIRLLKEITRENLEIVKEAIDALDAGLDDDELREVLDRIRERVKRSEDKLREVLERLKRDSKRIHKDLRKALEEAKKDVDEIRKETE

SEQ ID NO: 13679 - protein, 242 aa, Artificial Sequence; identical to SEQ ID NO: 13678
  Synthetic

SEQ ID NO: 13680 - protein, 238 aa, Artificial Sequence
  Synthetic
RREEELKRIIREIERILEELRRRSREIEEKLKKVLEEHERVSRRIKERVEDLKRKVRDKEKLVRRLAELLKEASDVNHKLIRDIARLLKEASEIIKRAVKRLSDLLEEVVRVLKDGNSDERLVDTARRLVEEIVRRLEKVVEEHEEIVERVVRRLEESNRKHRRLVKEIIDRLEDLVRRNVDEKDIERIVEEALKLHEDVHDENRRILEEAIRTHREVIKRLEEIVKEAIKLIEDVTR

SEQ ID NO: 13681 - protein, 238 aa, Artificial Sequence; identical to SEQ ID NO: 13680
  Synthetic

SEQ ID NO: 13682 - protein, 238 aa, Artificial Sequence
  Synthetic
SEKELLEEIEKRAEEVLREHDKRSEEIKRELERVLKELRDLSRKIEEDLERLVREVTDLEELVRRLVEIARRASKIIEDVVRKLAKLLREASEVIKKTVDKLVRLLEEAVRLLREGNTEEERVRDLERLVEEIVRRLEEIVRKHRELVRRIVERLREIVEEHKRIVEEVVKTLERLVENRVDKKDIERIVRELIKVHRDVLRKLEKVVREALELHDRVNKELREVVERALRLLREVTR

SEQ ID NO: 13683 - protein, 238 aa, Artificial Sequence; identical to SEQ ID NO: 13682
  Synthetic

SEQ ID NO: 13684 - protein, 239 aa, Artificial Sequence
  Synthetic
SEEEILKKIEDRLRAITEKHERMLREIKKELKKVMDEHEDLLRKIEKELRDVLERLRRGVDRKEVIELLARILEKVLELNERILRKLVKILKKVIDLHREAIRELLEVLEDVLRRLRGTDDDVARELERVVRELKEELKRSVEKIERAAREIEDLLRRVLEESKRLVEELKRRLRRIKDNNLDATLLERIVERARRELTKNHDKLRKILERLERILRELNEDLRRILTTAVDILRKLRK

SEQ ID NO: 13685 - protein, 239 aa, Artificial Sequence; identical to SEQ ID NO: 13684
  Synthetic

SEQ ID NO: 13686 - protein, 237 aa, Artificial Sequence
  Synthetic
REDEVLRDIERLLREIEEKIRRILEESTRELRKVEEEVKRIIERTKRELKKIKEDVERKGIDEELRKLLDEVLDKLTKLIERNKRSLERILELIKRIIDENLEVLRDIIRLLEELLKMTKDNRVPKDEVIKLVEDVVRRIEELVTRVVRRNEKLVKDLDDLAKKNVRENEELLREIDRKLDRDLLEKIKRVIREHIKALEKLARDLKEILRRHIEALKELARDLAEVIRKLLEDVKR

SEQ ID NO: 13687 - protein, 237 aa, Artificial Sequence; identical to SEQ ID NO: 13686
  Synthetic

SEQ ID NO: 13688 - protein, 240 aa, Artificial Sequence
  Synthetic
DLERLVELLKRIDDEAVKLVRKLVEVLKRIDEELVRLVEELLRALRRINEEVVRLVKRVPDKKKLKDRSEKLIREIEKLLDELRRRSEELLEEIRRLLERLKDESRKLLKRVEKELERVTDKKALELTDRWLKLHKEVVDRLAKLLRDWLRLHRRVLRELEKLTKEHLTEHERVVKILEDGRREEELLKRLRRIVEESKRRVDELLKELRKISEDVAREVERLLRELERISREVKRRVEE

SEQ ID NO: 13689 - protein, 240 aa, Artificial Sequence; identical to SEQ ID NO: 13688
  Synthetic

SEQ ID NO: 13690 - protein, 240 aa, Artificial Sequence
  Synthetic
SDEEVARELSDIVRKLVERNKESIEDAMRIVKELVDRNKKVTEDVLRLLEKLLEDVRDTPNDEELLKRVEEIVRRIAKELDDLVKETRKIVEEVEKRLRDDVKRTEDIVRELVKRAEEVNRTEKVEEAIKKIIRLLEEHVRIIREAVERIIRVLEKHVRIIEEIVRALITLARRIVELIARNGSEEFLRRLKEEVRKIVEKVKRDLERSLKELERILEEVKRMLERSLRELERVLKEIKD

SEQ ID NO: 13691 - protein, 240 aa, Artificial Sequence; identical to SEQ ID NO: 13690
  Synthetic

SEQ ID NO: 13692 - protein, 231 aa, Artificial Sequence
  Synthetic
SKEEILRELEELSRRLVEKLKDLLRKLEKLSDEVVKELRKSLEELKDLADKMVKKLGDSEIARELLKVVEEHVKLLEEILERLKTVSKDIVRVVDRIAKKLLEVTKEIVELVKRLKTDKDALRELERKLEDVHRRIREELKRLLDRLRDLHRRLKEILEDSKRKLEELLTRANSDKRLLEEIVKLLRDVAKRNLDLLEKHRELLERALEEVKRLLDEHLKLLRDALRRLKK

SEQ ID NO: 13693 - protein, 231 aa, Artificial Sequence; identical to SEQ ID NO: 13692
  Synthetic

SEQ ID NO: 13694 - protein, 237 aa, Artificial Sequence
  Synthetic
SREDLLRKLKELIETILRKSSELLDRLLKLVREHSETSERLIRELKKILEDILKLIKGGISEDDVRRIVKEAKDELRRSVEEVKKSVDDLKEELKRSLREVRELVKRIADALEEIVRRSSSLREVIKKLLELLRRLLEVHERTIRLLAELLERHLEVHEESIRLLLRLLEELLELVERKGDEKELRRIKEAVERVLRDHKRKNDKILRDVEEVLRRHLEELRRILKDVKKVLDEARK

SEQ ID NO: 13695 - protein, 237 aa, Artificial Sequence; identical to SEQ ID NO: 13694
  Synthetic

SEQ ID NO: 13696 - protein, 237 aa, Artificial Sequence
  Synthetic
DDEELLKRLEDLDERLLRFSKENLEELRRRTRELIETSETLLERLREIIETILKVIRDGARKEEVKKLVDELERVLEESLREVKRLVDELRETLKKSLEDVRRLVREIEEVLDKIVEDSSRLKDVIDKLREILKRIADIHEESLRRLVELLEELLRAHERSLRKLTELLRRLLEAVRQGGPERFLEEIAERVERILKEHRELLKRIEDEVRRVLTEHKKKLEKLKREVERVAEETKT

SEQ ID NO: 13697 - protein, 237 aa, Artificial Sequence; identical to SEQ ID NO: 13696
  Synthetic

SEQ ID NO: 13698 - protein, 237 aa, Artificial Sequence
  Synthetic
KETDEVVKRAKELVDTLLKVIKEHVERLKRLVEELLKVIRDHVRILRELAKRLREKVVKSEIADEVEKIVRDVARENERVVERIKRLAERNARSNDEVVRRIEELVDRLAKLAKKLDKKELLDTLKRITDEAIRLVEELLEENKRSMEELIRLVEDILEKNRRVEKKIIDLVRREPTTSDVERVLEELRRRLEKSVEEVERVLKRLKEELDKSVEEVKDVLRRLLEDLKRVVEELRR

SEQ ID NO: 13699 - protein, 237 aa, Artificial Sequence; identical to SEQ ID NO: 13698
  Synthetic

SEQ ID NO: 13700 - protein, 240 aa, Artificial Sequence
  Synthetic
SEEERVLEEIKREIDRIVKRARELLEKYRELVERIKRRNEEILKKYEKLLEEIERLADAGVPKEELLKLLREISKEHLKVLKELLDLVKELSDVSLEALKELLEELTRIVKEVLKALRRADIPEVDKVIETLERLLDELREVVERIIKRDADLLRKIEKVVRDIIETDKKLLEELERLIRAGVQERDLKRALRRHAEELTRLNKELNELLKEHEDELRRLLAELDRIVRKLLRTLKELTE

SEQ ID NO: 13701 - protein, 240 aa, Artificial Sequence; identical to SEQ ID NO: 13700
  Synthetic

SEQ ID NO: 13702 - protein, 236 aa, Artificial Sequence
  Synthetic
SKEEEAKRVIDELREELRRILRENTELVKESERRITELLKENSDLVEEVRRRLEEVLEKERDEKIKRLVELVEELLKRHNDIVRRLVKLHRDLLKRHNDVVRRLIELLDDLLRKLVEAIERGEDEKRLRKLLEDARRRIEKLERESREELKEVHERLKKLADDSRRLLEDVKRKLEEEGTREDLKRLVDDVLRLAEESHRKIEELNRRTLKLMEDSHRKLKELVRKALELITELTR

SEQ ID NO: 13703 - protein, 236 aa, Artificial Sequence; identical to SEQ ID NO: 13702
  Synthetic

SEQ ID NO: 13704 - protein, 242 aa, Artificial Sequence
  Synthetic
DSIERLAEELDKIVTDVLRVNEDSVRTWTRILEEVLRLNRELARILIDIARRVLELVKRKSPEEDIKRLTEELKRVLEEYERRLDRLTEEARDALREYERRLEELKERLRRALDRARKDVDEEVEKITRETEKELERLTETHKELVKTLEELLRRIVDDTARVIKEILDLLKELLDMTRELSEKELLDEVRRLLKRVKELLKRSIDLVEKILRDVKRLLDESIELVKRVLDKIRRLLEELAR

SEQ ID NO: 13705 - protein, 242 aa, Artificial Sequence; identical to SEQ ID NO: 13704
  Synthetic

SEQ ID NO: 13706 - protein, 239 aa, Artificial Sequence
  Synthetic
SEEDEVLKTLDRKHKEAKKELDKVLRELEEEHKKVKRELDEVLKRLEDIHRRITELLRRGDIRLEDVLRMVKEANRELVEVIKRIVKTVEDLNRRAVEVVKRLAEELERLNREMVKVLRKSGREEEIEKDLRRSSKDIRRLVEEIERRLRDSLRKLRKLADDLAKKLKESLDKLEELVRRGVDEEAVERVLKENKELIEEIVRLIRKILDENIELIRRIVRLLERLLRENLRLIEEARK

SEQ ID NO: 13707 - protein, 239 aa, Artificial Sequence; identical to SEQ ID NO: 13706
  Synthetic

SEQ ID NO: 13708 - protein, 248 aa, Artificial Sequence
  Synthetic
SKEEDVRRLIEELVRELRRILEENRRMLKELVEKLEEVLRRSEEVWRRLAKELDELLKELNRDVVREAVETIRRVLEDLVELDRRVVKVIKEVLERHAKSSTELVRELEDVLRAAVEAIEKVKREEDLKRELRKLKERLKKVLKRHDDTNKELFRELEDVLRKHEEELRRLADELRRLLEDLKRKGDIPEEVIKKIEDLVRKTERELREVHKELRRLVEEAKEVVDRSVEILRDLVRKIVRILEESAR

SEQ ID NO: 13709 - protein, 248 aa, Artificial Sequence; identical to SEQ ID NO: 13708
  Synthetic

SEQ ID NO: 13710 - protein, 249 aa, Artificial Sequence
  Synthetic
STEDELRKIKEELEDIRRRIEELDKKDNEDLDRIDEEIKRRLDKNIRDLDEIAKEVRKRRQDKDLLKEIVERLAEVLRHHVRVTADVVRLLAEVLKHNNELLKEAVRLLTELLRKILKVLKDAGKPEDEVRKLKEELEEIERRLRELVERNRRLSEELIRRAEKNVEDVRKKVEDLIREAEEVVKANLPKEELAEITERLLKKYREVAEENMRSLKELLREYREVNTRTHKALERIIDRIREILEKVRK

SEQ ID NO: 13711 - protein, 249 aa, Artificial Sequence; identical to SEQ ID NO: 13710
  Synthetic

SEQ ID NO: 13712 - protein, 233 aa, Artificial Sequence
  Synthetic
KEKEAIKEVAELLKRLIDDLLRLLKEDVDTARRVLDEIKKLLEENERIAREVLRRLREDKGKERAEELVREWIERTREILKRIEELLRRWTRKTREILKRIEELVRRVIEVVRRLDVPKELVDKLEEVLRKLLKLVEDHVRKVEKIIRELLKLIKEHVEKVERIARKLLELLRRNRDETDLDRIVKEMEKVLEDSIRELEKLVKRLEDILRESEKALRDLLRELRKVLEEVRT

SEQ ID NO: 13713 - protein, 233 aa, Artificial Sequence; identical to SEQ ID NO: 13712
  Synthetic

SEQ ID NO: 13714 - protein, 230 aa, Artificial Sequence
  Synthetic
SSMETAVKLVKDLLREDIRSNEEHVRLAKKLLEEDIESNERLLRILKKLLDLVEKTEDDEKLRKDLREVLEELRELVDRNKKRLEDVLRESERLATENKKRLERVLRELERTGLEERVLREVRKLLEELKELNDRTLEETRRLLDRLKKLNEEILELLERLLRRLEKLRKDKSDREELRRVAEEIKRRAEELLRRTEELVRDILRRHEDALRRTEELVRRIEKRLRDATR

SEQ ID NO: 13715 - protein, 230 aa, Artificial Sequence; identical to SEQ ID NO: 13714
  Synthetic

SEQ ID NO: 13716 - protein, 247 aa, Artificial Sequence
  Synthetic
RELEDVLRMIEELARRLVEILERHNKLSKRVIELLVRILEEHLKLVAELIKKAVEILRRILREDGKLAEEVIKRLEDAVEESKRNVDETKRKLKEAVRKDNELVKTVKEILKRVVDTVRELVKNNGDKEEIIRLIREMLKKLEEILRESEKLLRDLLEEAERSLEENIERLERLLEDLKRIIENANVRDDIRKLLKELLDDVKKIIDDSRRLLDELRKELEKILKESEKLVDELREAVDRLIRKVRE

SEQ ID NO: 13717 - protein, 247 aa, Artificial Sequence; identical to SEQ ID NO: 13716
  Synthetic

SEQ ID NO: 13718 - protein, 237 aa, Artificial Sequence
  Synthetic
SREELLKELRKLVEEIKRRSEELLRRLEKLLEDNERRTRELLERLKELLREIEERIRGGRPSEEVIRLLEELVRAIERVLEEHLESNRRLVEAAERVLREHVELVKRLVRAIEDVVEKELEEDKIRTIKKLLDEWRRRLEKLVRDVRRKLEEWIKRTEEMIDEVRRLLEELKETIRRKGNDRDIVRELTELVRRLLKRVEELLKRSLEILRELIKAIADAIKESLDILDRLLREVAR

SEQ ID NO: 13719 - protein, 237 aa, Artificial Sequence; identical to SEQ ID NO: 13718
  Synthetic

SEQ ID NO: 13720 - protein, 242 aa, Artificial Sequence
  Synthetic
EEEEVLRRLRELIERLVRETEEKLKEIERRIEEVLERHRRALEELKKEIDEILEEAERRKEKVEDVVRELRRIAERLLEINERSLELLRRILKALEEIVTRHLDTLRKIAEEIIRAMRDSEKAKKLLEDLRRLVEENKRRVDELVKKVERVVEEIEELSRRLLEKLERVLKEIEDVAREGTSEEALRRLVEKVKRVLEEILKVSEEVLEKVKKVLTDILKRLKELVERNVRLLERILDEARR

SEQ ID NO: 13721 - protein, 242 aa, Artificial Sequence; identical to SEQ ID NO: 13720
  Synthetic

SEQ ID NO: 13722 - protein, 241 aa, Artificial Sequence
  Synthetic
SKIEKLLRVIKKIIDKLEELLKRLLEVVRESIELLKRILDELLKVVERTADELRRIVNDKRLLEIIEDLVRRVLELHERTIDDVRRLVKEVEEEWKRVIDELRKLVKKLEDIVEEARKSEDLETVLRLVEELTRRIEKTTEDLERRHEKILKEIIDLIRENLKRHEDITREIIKAIEKLPTTKDLERLLRKVKEDNDRVKKEVERLLKEIEDRNRKVVEEIKRRLEEIKRELDKVVEEIRR

SEQ ID NO: 13723 - protein, 241 aa, Artificial Sequence; identical to SEQ ID NO: 13722
  Synthetic

SEQ ID NO: 13724 - protein, 241 aa, Artificial Sequence; identical to SEQ ID NO: 13722
  Synthetic

SEQ ID NO: 13725 - protein, 241 aa, Artificial Sequence; identical to SEQ ID NO: 13722
  Synthetic

SEQ ID NO: 13726 - protein, 238 aa, Artificial Sequence
  Synthetic
KDEDKLRRIVAVLEDLIRLTEELAKILKRVTERLKELTEELKRRNEKVVEEILKLLRDSGLQTEDVTRKLKKIRDDYKRITDKLREDHERIREELEKILERLKREHERIIRTLEEISRKLRGEELVDTLLRLVEEVARINVEVLERLIEIVERLVEINRRVLEEILRLSAKLAEDLDRSIGDEEVVRRIRELATKNLDDNRKALEESRRIIEEIVKRIKDVIRTSREIIKELRKEIRT

SEQ ID NO: 13727 - protein, 238 aa, Artificial Sequence; identical to SEQ ID NO: 13726
  Synthetic

SEQ ID NO: 13728 - protein, 231 aa, Artificial Sequence
  Synthetic
KEAEELVEVVRKHIKTLAEIWKKLVDALRKHVEILRRLLKELVEVIRRAIERVRRDGIPEEVIRDAERVLRRIEELIERLLRENERVIREVEELIKRNLDENRKVVEDLKEVVDRNGDKRELTEIVRRLLKSNKRVAEEVVRLTERLLRENKKITDELVKIVEDLLRRITKTRGRTERLDTVLEELRRVLKELERKLRESIKELRDVLREVEERLKESIEELERVLDRLRR

SEQ ID NO: 13729 - protein, 231 aa, Artificial Sequence; identical to SEQ ID NO: 13728
  Synthetic

SEQ ID NO: 13730 - protein, 239 aa, Artificial Sequence
  Synthetic
SEEEIAERVKDLIRRVLEEHERSVKKVEDLIERVLREHRRVLEEVRRLAEELERRLGDEKLVRAVRKIAEDVVDIIRKILEIVRRTVELMKRIHKKVLDIVRKLVEDVLDILKRREREESVEEVKRRVERENEKLKREVEKVKKEHRDALERLAKEVDDVLRDAKRFLEELEKDVSNIEDDRRKDDLRRVLEELLKRLKELLEELKRINEELLKTLEKLARDNLEINKELIKRLDEETR

SEQ ID NO: 13731 - protein, 239 aa, Artificial Sequence; identical to SEQ ID NO: 13730
  Synthetic

SEQ ID NO: 13732 - protein, 246 aa, Artificial Sequence
  Synthetic
SEEDVLRKLEEIVEELERSNRDAVRRLEEVVKRVEDLWEEVVRRLRELVREVEERLRDVEAKEVVEELVKVLEEAVRIVEKALRDHVEVLRRVVEKIADLLRRNVDVLRRVVEKLKRILEARRRVDEKEVRKRLDDIRKELEDVLRETRKTVKKIEDDLRRVHKRLDEIIEDLKRRLKEVLKRVEEKGVKKKEIEEIIERVLRLLAELLKRVKRISEDLKRLLDELIEENADILRKLDELVTRDET

SEQ ID NO: 13733 - protein, 246 aa, Artificial Sequence; identical to SEQ ID NO: 13732
  Synthetic

SEQ ID NO: 13734 - protein, 251 aa, Artificial Sequence
  Synthetic
DKERIIKRVLDELKEALKKAEKLHEDVLRELRRLLDEALKLHEDVLRELEELLRKIESTLEDEKLKKKLRDVKRDIDRLVERNRRLLEELRKRLEDLVRRNRELLERLKRKLEELDRRIKELEERGTPREELLERVAEIIREILEDIRRVVTHLRKSIRDILKEIREVVKHLVEVIRDIARRITELLAEDRNREKVEELADEIRRVVKRIEERHDKLRKDIERLVRRIEELHKRLLEELEELVKRITEELK

SEQ ID NO: 13735 - protein, 251 aa, Artificial Sequence; identical to SEQ ID NO: 13734
  Synthetic

SEQ ID NO: 13736 - protein, 231 aa, Artificial Sequence
  Synthetic
SVLETIVDIVRKLIELIEKLLRDLLELDKRNVDAVARNADKILKIAEDIVRTIASKGVPEEVKRRLEEILERIARLVRESKERLKRNNEELEKLVRKLEKELKEVLDDVKRVVDAGEDKDDALRRILELLDRLLESIKRVLKEITDSNKRLLDEHERVSKELIELLREMAERVNLDEDLKRELDRLIKEIEESNRRLKKTTKDLVDEVERILRKIKDDIEDVKRKIEEDKR

SEQ ID NO: 13737 - protein, 231 aa, Artificial Sequence; identical to SEQ ID NO: 13736
  Synthetic

SEQ ID NO: 13738 - protein, 245 aa, Artificial Sequence
  Synthetic
SEDELLDRLDESVKEVLDRHRKLLEDLADTIRRVIKKVKDLLDEHKKTLEDVIEKVLRRGIDVEELEKVKDELEKAHKKLEDDLRRILEEVKRLVEELEKHLKRIEDEAKKAIEELRRREPDKELLDRALEAIDRLLKLLTENIKRIEEIVKELLDRLKRIVDELLKVSERVVDLLRKIVDKLDTDETVVRDLRRLLEELRRISEEIVRDLRRLLEELKKIVEDVVRESKKLLDDLRRIIDETVR

SEQ ID NO: 13739 - protein, 245 aa, Artificial Sequence; identical to SEQ ID NO: 13738
  Synthetic

SEQ ID NO: 13740 - protein, 243 aa, Artificial Sequence
  Synthetic
SRAERLADEVRKAVKKSEEDNETLVREVEKAVRELKKNNKTWVDEVRKLMKRLVDLLRDNQVRDRDLLKELEEVLRRVLEALAENHERTEEILKRWLDRYREDIERLRKVLKEVIEALKREGRDDKRIVDELEEILRRNEDVLDKIKKRLRRLLEEDRRLLERIVRELKRLLDDLDRITKELKSEELVRIAIEVLKRLLEIIEELVRLNNEILERLLKIVRELHKDNIKILEDLLRIIEEVLR

SEQ ID NO: 13741 - protein, 243 aa, Artificial Sequence; identical to SEQ ID NO: 13740
  Synthetic

SEQ ID NO: 13742 - protein, 236 aa, Artificial Sequence
  Synthetic
SEVETLIRLIEENLRLLKEVADLSLEVIERLLRILKEIVKRSLDVIRRLLKLIEEVLKDRRLVERAKKEIDRLLEENDKLLKEVEKVIKELLEENRRLVTRVRRMNEELLRLIKENRKRKDDLLRELKDLNRKVLKALKESHDKLKRALEEVLRVLTESHKRLEEVLKEILDELRRRGVEDERAKKRLEDLLREHREILKEVVKRLKELLDRHRKLLDEARRESKRVLDEIDEKTK

SEQ ID NO: 13743 - protein, 236 aa, Artificial Sequence; identical to SEQ ID NO: 13742
  Synthetic

SEQ ID NO: 13744 - protein, 236 aa, Artificial Sequence
  Synthetic
SRVETLIRVVEKNLELLREIVERSLRVIKKNLRLLEEVARLSLKVIKELLEEIKRRVRTEDLLRDVERKIRDLLRKNEDLARRVREINETLLEENRELLRRAEKVNKRILDLIRNNEKPSEVLARELEKVNREVLKALEESHRKLRKVNKEVLEVLKRSHDETEKVLREILTELRRSGNEDRRVKEELKRLLEKHRELLKEAVKRSEDVLKEHKEVLDDVRRESEKVLEELRRAET

SEQ ID NO: 13745 - protein, 236 aa, Artificial Sequence; identical to SEQ ID NO: 13744
  Synthetic

SEQ ID NO: 13746 - protein, 245 aa, Artificial Sequence
  Synthetic
SEKDEVTRRIRELLKEAEETNREAIERIKRLLDRVREKVEEVAKRSEELLRRLKKVLDRDLQDDEALLKLLIDALREHNRLSTELIKILIDVLRTILKIIKDVLATNIEIARRILDLVRRLAERAGLDDRLVKEVEKLVRTAERLHRDALRKVKRLVEELEKRLRELVKTDHDLVRRLETLLRRKERRKEDLLREIARILRESLRLIRELLKEIEKIVKEIIELLERLNDELRKIIEKILETTKK

SEQ ID NO: 13747 - protein, 245 aa, Artificial Sequence; identical to SEQ ID NO: 13746
  Synthetic

SEQ ID NO: 13748 - protein, 231 aa, Artificial Sequence
  Synthetic
SRKELLKKLREVLETNLKLIEDLVRDIERALEEDRKLIEDLLRRIEEVARRILELRERGGSREEDVIREAEKIAERLKELVEKLADDSRRIVEELKKRIKELLRRSEKLVEELKKDLREDEKLLKLIEDLLRVSRRVIEALLEIVERLLEVSERVMRAIKKLIDDLMKVLRAGVEDKRLREVIKRLIEELRRLLKEYEDVLRKVREDLKKLLEEYKRVLERVDEELRKRDK

SEQ ID NO: 13749 - protein, 231 aa, Artificial Sequence; identical to SEQ ID NO: 13748
  Synthetic

SEQ ID NO: 13750 - protein, 243 aa, Artificial Sequence
  Synthetic
DEEKRVEDVLRRVEDLLRKLEEEHRRIVKRIRDELRESERKIEELVDRLRKEIDRIRKTRDDRSSVVTELIKILEEVVRAIERIVERNIEILDRIVKLHRELVKRTIEILREAVKLVAELADSEDAKRILKKLKDIVRALEEKLRRLNKEVEDVVKKLEDDHRRLVERVRRVVDELRELLERNTVRKEDLLRRTEKVEREIRKTLDDLHERTRRVVEETLRKNEELLKEIKRVVETILDEIRK

SEQ ID NO: 13751 - protein, 243 aa, Artificial Sequence; identical to SEQ ID NO: 13750
  Synthetic

SEQ ID NO: 13752 - protein, 234 aa, Artificial Sequence
  Synthetic
SKKETLVKLAEEIIADIHRVNRESLELIKRLIERVEKLTKESLDSIRKLIERILRDIDDEEVVERIERLLKKLLDENEKIIREIRELLDRLKKANEKVNEEIKKLLDDLKKELRDATDEETAIRLLVDVLRKILELLKRLSEINVRVLEEIVRLIRELSERNKRVLEDALRLVKERVDSDEVREIKEKVRELIDKDRRLVKEIEDLAREILDTDRKLVKRLEEVVRELIERARR

SEQ ID NO: 13753 - protein, 234 aa, Artificial Sequence; identical to SEQ ID NO: 13752
  Synthetic

SEQ ID NO: 13754 - protein, 236 aa, Artificial Sequence
  Synthetic
DEERVLTEIEKLVKRLKDRNDEIRRELEKTSKRLEEELERIERELDRLVEELKKELERTKDKDTIVRLIIDVVRKLLKLLEEILRLILRVIERHIELLRRLMKENIDVIKRILEELAKAADSKILEEIRRLLTEWIRKSKEIADEVDRLLKEWLDEVREIAEEIRRLAEELIKRIKDRRSDKDLEDLIRRVLTRVKELARRLDRKNKELLKEIERLIREDKETADRVKTEIKKKTD

SEQ ID NO: 13755 - protein, 236 aa, Artificial Sequence; identical to SEQ ID NO: 13754
  Synthetic

SEQ ID NO: 13756 - protein, 248 aa, Artificial Sequence
  Synthetic
DEEELVRRVEKLARDIEETLERLVKELERLYREIEKELKRLVKELEDANRRIVKRLKDLFDKKAPLERLVREVLELVKEHLKLVEDLIREVDKLNERLAEANEKLIREVLKLLKELLDIIAESVDSRKLEELERLVREVIREVAELLKRLKELHDKVSKDIRELLKELRRLHEEVIKTIKKLLDERMPDEEVLRRIEKLNKELEDVLREVEERIRKLLRELEEVSRRVTERIKRLEDELRKAFEEVTR

SEQ ID NO: 13757 - protein, 248 aa, Artificial Sequence; identical to SEQ ID NO: 13756
  Synthetic

SEQ ID NO: 13758 - protein, 236 aa, Artificial Sequence
  Synthetic
SKKEDAIRKARKLLERIRRLADKAIKRSRRLLERVRELVKESLDILRKLLERLRDLVRKIKKDGKREVLKELIRLLEELLKINKRVLDSVIELVERVIRSNEDVLRKVIRLVEELIRLVEETTDAKKLRDELRRLKEELKDIARRNRERLKRLEETLRRILKKSRDDLKRLLDEAEKKDITDELRRLTEEILKLHEESVKKLEDLTKEALEASEDVHRKLEKLTEEILRRTEEAEK

SEQ ID NO: 13759 - protein, 236 aa, Artificial Sequence; identical to SEQ ID NO: 13758
  Synthetic

SEQ ID NO: 13760 - protein, 238 aa, Artificial Sequence
  Synthetic
KEKEEADRELRELKREMEDILREVEKELRELLKKSEELLEEIERLSKELTDEAREVERNNLPEDELATELLKVIKKILDVNRDVVRKHEEILEDLERVLREVVRKLLELIRKLLDVIRRRVDSEDLKRVEELIREIEETIKKLLRELEKLIRKVKKRTRELLKESEDLIREVLDVIEKNKDLRELARKLLKRLKELNDRILETLRRLNEETARLVKEVLDTARRLLEELIRVLDETRT

SEQ ID NO: 13761 - protein, 238 aa, Artificial Sequence; identical to SEQ ID NO: 13760
  Synthetic

SEQ ID NO: 13762 - protein, 247 aa, Artificial Sequence
  Synthetic
SKEDRLREILTELKEVIDTILRKLEEDARRLKKAHEESNEKLKRIVEDLERVLRELLRKLKERVDERLEEEAKRILTEVRKELKKIEEEARRINKEYEDDVRDIERKVERIKEKLERLVERIERSDRDEKELIEEVIKVIEDVLRLIEELIKEWIRVNEKALELDRRLVEEVKRVIERLLRAIERLISKGNKELLDKAKEIVDRVTEEVERILEENERLWRESIKDVKRILDEAREIVRRLLEEVRK

SEQ ID NO: 13763 - protein, 247 aa, Artificial Sequence; identical to SEQ ID NO: 13762
  Synthetic

SEQ ID NO: 13764 - protein, 233 aa, Artificial Sequence
  Synthetic
DESEKVKEILERIERSLREVKRRVDEVLKRIKELLEELKRRHDESVKELKRILEEIRNSDKEAVKRVEKREREIIKRDIEVNERVLRELKKLLEELKKVLEENLKRLKELLEELDTTDDIRREVERLIKENRELIKRVEEEMRKLEETLRRMAKEYKREVDELEERARKSNLDGEELAKTLEKLAKELLDANRRLVDTSVKLVKRLLEIVAELVERHKESNRRLLKLIEDRDR

SEQ ID NO: 13765 - protein, 233 aa, Artificial Sequence; identical to SEQ ID NO: 13764
  Synthetic

SEQ ID NO: 13766 - protein, 236 aa, Artificial Sequence
  Synthetic
SEEDILRRVVEELERLIKEAKEIIEEIRRLHEELDRKSEELLDRLLELLRDLLRRLNVDDERLRRALERVEREIKRLKDEYKENNKRLEEEVERLKKELDDALERLKRELDKLKRDKDALAKLVKELLDVVREVVEALKRLSTHNVEVNEKLDRDLVRLWEEAVEVIKRVLRERLSDKDKVRRLDELVKELLERLRRLHEENTEEVERVLRESARLLDDLLRKVEEVVEKIKEELR

SEQ ID NO: 13767 - protein, 236 aa, Artificial Sequence; identical to SEQ ID NO: 13766
  Synthetic

SEQ ID NO: 13768 - protein, 237 aa, Artificial Sequence
  Synthetic
SREELVKDILRLLTESNDEHKKLSDKLVDLVRKLIELAEKLTEEVVDLVRRLLEELNLDEEVLRRLKEILEKLRKDNRDVLEELKKVLEELKEANAEVHRRSERLLRELKKRLDKVKGEEAVKLIEDVLREHSRLLEESVRRNERVAERLVELLEDLVDKNRRVLEELVELIARALDSEDAKELLKKVKEIVDELVRRHKKLVDEVREVVERVVREHRELVKKDRRLVDEVLKRLRT

SEQ ID NO: 13769 - protein, 237 aa, Artificial Sequence; identical to SEQ ID NO: 13768
  Synthetic

SEQ ID NO: 13770 - protein, 237 aa, Artificial Sequence
  Synthetic
SREDLTRETERLLRESNEKHKELTKEIIRLVDRLIKLLEELTERLKELVKELLKRLRLDKEVLDRLREILKELDEANRTVVDTLRKVLKRLKEELDRVHRESEELLRTLRDLAERVRGEELVERITRALETHSELLERSVELLKRVLEELVKLARELVKRNEDVLRRLVELVERALDSEDAKKLVKEVRDVVERVRREHDKLVKEIEKIVRDIEKKLRDLVREDRELVKKIEKKLRD

SEQ ID NO: 13771 - protein, 237 aa, Artificial Sequence; identical to SEQ ID NO: 13770
  Synthetic

SEQ ID NO: 13772 - protein, 239 aa, Artificial Sequence
  Synthetic
SAEDLVRRVKDLVDKLEDKLRKVVRTNERLWEEIRKRLEELVRRNKELWDRLVEKLKAGDKDKDELIEEAKRLEDESNKLVEKLVRDIERVLRESNKLLDTLAKEIEEVLEEIVELVEREGLADKKAREKLEDIKRRLKEVLKKLREESKRIIDELRRLLEEYKRLVKEIRDRIEEVRKRNSEIRVLVELVRRHNKVLKELVEELEKLVRDHNRVVEEVVRELVELLRRAVEVIKEVVK

SEQ ID NO: 13773 - protein, 239 aa, Artificial Sequence; identical to SEQ ID NO: 13772
  Synthetic

SEQ ID NO: 13774 - protein, 253 aa, Artificial Sequence
  Synthetic
REKEVIDDVRRMLEDLLRTIRRVIEENKRIVKESSDHIREVLKRVLEVLRRLLEEVKRLTERPVDEEDVKRTAEELLRILEEVVKEVEDAVERNRRLIEESIKELKRIADELVRRAEAVIEKVETELGRESEKVERIVRIIEEVIEAIKRIVKSLVEINEEYVRLVEELVKDIVDIIRRVAKLLKELADSRRDRKDVERELEKIIREVEERLRRVKEKLDDIDRRAKELHEEVMKRLEELVERIRRLLEDVER

SEQ ID NO: 13775 - protein, 253 aa, Artificial Sequence; identical to SEQ ID NO: 13774
  Synthetic

SEQ ID NO: 13776 - protein, 254 aa, Artificial Sequence
  Synthetic
SDEEILREILKTLEDVVRRLEELLKENEKLIRESTKLIKDVLDELLEIIKRVAKLIRDLKRNKVDEKTVEDIVRKIEEDLKRVVDKLRKLVKESEKKLTDSVKALRDVVRDIERLLRELVDKARKNVRTDELREVVERLEKLLRDALRVIKRIVDELERLNREYLTDVKEIVKRLAELLDDILRVVREIARDEDEETVERKLKKLLDKARTELEKIKRRLDKLNEDYERKLRELEKRLRDLLERLRKTLEDIRK

SEQ ID NO: 13777 - protein, 254 aa, Artificial Sequence; identical to SEQ ID NO: 13776
  Synthetic

SEQ ID NO: 13778 - protein, 242 aa, Artificial Sequence
  Synthetic
SEIEKILEELKRLVERVLKLNEDIARRIAELVKKDLKLIEDLLRELEDLVRKILDALRKKKDSKELVEEIKKRLDELLKRVREESDRVLKELKELLDEVRKVHEEIKEALERLLDKARKTIKDERILRLIEEIVKRLIELVEDNLRKWEELVKRHIELNEELLKRLEKVVEDIKRIIELVARGEEDKDKVVEEIRRLLKRLKEEAEKVARESEELLRRIREASKELAERAKDLLRKLDEAVR

SEQ ID NO: 13779 - protein, 242 aa, Artificial Sequence; identical to SEQ ID NO: 13778
  Synthetic

SEQ ID NO: 13780 - protein, 251 aa, Artificial Sequence
  Synthetic
SDEERILDTLRRIIEDLLRLLREALRRHEELLRRNIELIRRVLETIKEVLRRLLKLLLEVAKEEIKELKDALRKLLEELDKALKEYKKRIKDSLDELRKVIKRLEEELRRLLRELEEVRKKIEDRKTLIDTLKRVIDDIVKLLEDALRDLERVLDENMELSRRVVEILERVIEDVLRLLEEVVRRLKERRDREELDRLLEDVRRVIEELKKLVREVLERSERMVKEVRDLWRDLKRRIEEAAERIKDELRR

SEQ ID NO: 13781 - protein, 251 aa, Artificial Sequence; identical to SEQ ID NO: 13780
  Synthetic

SEQ ID NO: 13782 - protein, 239 aa, Artificial Sequence
  Synthetic
SERELLEKVRKVAEENIRILEEVLRKIAEVVKEDLKLLKELLEATERVVEELLKRIVEKKKREPEEAIRRLRKLLKELREEMERVKKESKRLLEELERILRRAKEKTEELLKRLRELLEAGLPRKDLAETLLRVVEAHAKLLRDVARVLLKLLEDHIRLSRELARRTEEVLKRIAKILREESEDETLERLLEELERLVKEVVERSERLLKKLLEDVRRVAEELVKSVEDLLKDIEREVT

SEQ ID NO: 13783 - protein, 239 aa, Artificial Sequence; identical to SEQ ID NO: 13782
  Synthetic

SEQ ID NO: 13784 - protein, 232 aa, Artificial Sequence
  Synthetic
REKELVDDIRRILEEILRLLRRLLEEVIRLLEENEKLVRRHLKTVIDILRRVAKLLDENGIRTDEADRVLERLEKAHRELLEDYKRALEKIKETLERVLREAEEVVKKIDDALRKLGGSKEVLKRLLEELLRLVEKIAEEIKRLLKELVRVTEELVRTNKELLEEAVRVIRKEVEDDSLVREVEELIKRLEKHIDDLLKTSRDLVKRVLDLVDEVVKRVEDLVERVKEKIDT

SEQ ID NO: 13785 - protein, 232 aa, Artificial Sequence; identical to SEQ ID NO: 13784
  Synthetic

SEQ ID NO: 13786 - protein, 247 aa, Artificial Sequence
  Synthetic
DEERLAEELERVLDRNRKLLEEALRELRRVIEENRKSVKRLLDELKRVLDELLKVLRELSRDDKDEKLRKVIEDLIRKLTKVLDKVRRLVEENIERLRRVLEKLERLARENLEDLKKVLDDVDKKLKDRRLVERLAELVRELIEVNKEILEMLKEIVRELLEINRTLLERLKDLVRTALEIIKLLARGDITEEDVERAVKEIRDRLRKLLEDYERAVRRLEDKLRRVRERYEKVLKRIKDKLEETKR

SEQ ID NO: 13787 - protein, 247 aa, Artificial Sequence; identical to SEQ ID NO: 13786
  Synthetic

SEQ ID NO: 13788 - protein, 247 aa, Artificial Sequence
  Synthetic
SREEVLRELEEVIEDNRRLLEELIEKSKKVLDESLKLIDELLRRLEEVLERVLRLLEELSKLDDEETLRRIVTKIRKELEDVLDEVRRIVKEILDRDRRVAEDLKRVVDENLEKLKKVLDELDKKLKDRRLVEILRDIVRLLIEINERALRELLKLHEEHTRIVAELLRELERVVEELRRLVELIARGEIREDDLKRVVDEVEKKLRELKRRYKEALERIKEKIKELKDRYERAVREVVAELRKTTK

SEQ ID NO: 13789 - protein, 247 aa, Artificial Sequence; identical to SEQ ID NO: 13788
  Synthetic

SEQ ID NO: 13790 - protein, 230 aa, Artificial Sequence
  Synthetic
KKDEEIREKLDRLLEENRRALEEITTRLDDLLRRNKDALRKVMEKLKRLLDDLRRADIREELLKRIADVIRDIMRLLKELHDHTAEVIKTIKKLLKELHDINKEIIERLKRLKDNNVPKEELLKRVEELVRTSLRLTTEVLKTVEKLIRDDKRLSEEILKRVKELIEELKRRVDIERVKEILERILRVVEEAVRLNEESLRRILDVVRKAVKLDRESLKKILDVVEEAVR

SEQ ID NO: 13791 - protein, 230 aa, Artificial Sequence; identical to SEQ ID NO: 13790
  Synthetic

SEQ ID NO: 13792 - protein, 243 aa, Artificial Sequence
  Synthetic
SRVEELKKLIEDILRISREVVERIKRVAEDIHRINRRVLDDLRKLIEDILRTVEEILARKVKDTEMAERLRDTIRRVVDEIRKLLEEHEKRSRELLEEIRKLLEDILRRSERAVEEIRELLKKNVRTKDVLRIIEEILREHLELLERVVRRIEEILRELLKTIEEIVKRIKEILEELKEVLKRGRVKDDEVEREIRRVKEDLDRILEEYRRLLEEIKRKLEEILRRVEELHRRLRRKLEEIDR

SEQ ID NO: 13793 - protein, 243 aa, Artificial Sequence; identical to SEQ ID NO: 13792
  Synthetic

SEQ ID NO: 13794 - protein, 244 aa, Artificial Sequence
  Synthetic
SRVEKVLELLKRIIEILRELVKVHLDVLRHNDELLKRIVEDLKRLVKKLVDILKEIVEKRKGEELDEIVRRLAKKLDEIIKTLKRLVDELARRNKESIDTLRRLVERLEERLREIVKLLKKLEEEGVDEETLKRLIETILRDIERVVRELKEIMDRINDENRRVVETLVKIVDDLLKDVEDVVRRANVDEEALERLKRLLEEIRERLEELKKRLEESLKRHEEEVRKLLDKLRRLLRRAEEEAR

SEQ ID NO: 13795 - protein, 244 aa, Artificial Sequence; identical to SEQ ID NO: 13794
  Synthetic

SEQ ID NO: 13796 - protein, 232 aa, Artificial Sequence
  Synthetic
SKEDELRKVLETLERLARELEELNKKILDDLKKLIEELRRHTEEVMRRLKELADELRKKPTSEDLERILRRLEELLEEHKDDLEKITETLERLVKKHNDLNKEVLDKLRRLLEKAKKDRTGREVLKELDEIIKEWRRLLEESIRELREIIKEIKKRLDDSIRKFEKMVEDVERSGAGEEVVRVLEELLRLVRDNVRRLDEILKELLRLVEESVRTAEEILKELLRLIKELAR

SEQ ID NO: 13797 - protein, 232 aa, Artificial Sequence; identical to SEQ ID NO: 13796
  Synthetic

SEQ ID NO: 13798 - protein, 237 aa, Artificial Sequence
  Synthetic
SIEELVDELLKVLKEVVEETAKLLEENNRRLKKITDDVRRLNEDTIRRLREVVKELETKRDERDVVRRIIEKLKKVVDDYRRVIEELIKRNEEVAEESRKVSEKLLKELEDLLRDIEKKVKSREKVRMLKRLIEELIRLNKELADIDVEINKKVSEVLRRNLEKVVEIAKRVLDVIRRDTDDDKARKALEDLERELRDVDRRSDEEATRLHEEHKKALDRYVKELKRVLDKMKEDTR

SEQ ID NO: 13799 - protein, 237 aa, Artificial Sequence; identical to SEQ ID NO: 13798
  Synthetic

SEQ ID NO: 13800 - protein, 237 aa, Artificial Sequence
  Synthetic
SEKELVDKLIKLLEDVVKKLEDIARDNNRILKEIADRVKELNERTVEEIKRVIEELRRKKDDREVVKKILEDIERVLREYEREIEKLIKRNDDVARKSEEDVRRLLEEVKKVLDEISKDLKDERLVKALADVIRKAIELLKRLLDKDVKINEEVSRILKENLDEVRKIVEELLKLIERDTDEEKLTRAAEDLLRKLRRVDEESDKKLREVHRKHKEALEEVKRRLKEITEEADRATR

SEQ ID NO: 13801 - protein, 237 aa, Artificial Sequence; identical to SEQ ID NO: 13800
  Synthetic

SEQ ID NO: 13802 - protein, 240 aa, Artificial Sequence
  Synthetic
SESELIRELEKLVKEIVDELERLLRNNIRLLEEVAKTLIRLLENNIELLDEILRELERLSKENRPDDEVRRTVEELLRRSREHSREVKETVEELLRRLERHSEEVRKTVEKLLTDLRRVVERNNQEDLRKLVDDIERVLRELLEVNRRANKKAKEVLEELLEVNDRANRKVERLLEVLLRGEVSEEEVRRTIERLKEEHEDALRRLKEILEELKDEHRRVLKRVKDKLRELKRRLEEREK

SEQ ID NO: 13803 - protein, 240 aa, Artificial Sequence; identical to SEQ ID NO: 13802
  Synthetic

SEQ ID NO: 13804 - protein, 228 aa, Artificial Sequence
  Synthetic
SEREELERLLKELEDVTREVVERLKKLLRDNEKLTDEVRKRLRDLLRRLEEMVRRRGLSDEVLKDLKRLIEELLKTVEELLREHIRSVEELLKAIRKLLEDHIRLIKELVRRADQRDETLERVDRKLEEDHRRILRRLEKVVEELKKEHERILRELEKVVDKVKKDLERVRREEEIEEIVKRLVEVLEKVLRELERASRKLVKVVEEVLRALEEISKELVDVVREVLR

SEQ ID NO: 13805 - protein, 228 aa, Artificial Sequence; identical to SEQ ID NO: 13804
  Synthetic

SEQ ID NO: 13806 - protein, 244 aa, Artificial Sequence
  Synthetic
DEDRRLEDAVRKLRKEHKDIMKKLDDIMRELDEDHRRIKERLDRILEELKKLLTRVLRETREDELLRKVLELLTRLLKLLADVLEENKRLLEDILRLLKELIETNLRLLEEILRLLRKVRREPVSEEEAKRLVEEITRLLERSTEEARKLVETIKRLLEESLDKLRRLVEEIERRLRTVLEEIRRRGAPEEIERIIRRVIEVIREILDLVRKVNKKALRVIEEILEDLARVNKKAVDAIDELRK

SEQ ID NO: 13807 - protein, 244 aa, Artificial Sequence; identical to SEQ ID NO: 13806
  Synthetic

SEQ ID NO: 13808 - protein, 244 aa, Artificial Sequence
  Synthetic
DEERLLKTILDVIRKVLKESKDILRRVEEILRRVIETAKEIHKEVKEIIEDVLRLLRENDKLEELVREVAKRLKEVIDRWREVVERVAETLKRVLEEHEEVVRRVARELEELLKRLREGEKLRAIEEVVKKVVRALEELSKELEKIVRTIVKLLRENVRRLEEILRRVVKLLRELVKLAKERSREEEIEKRVREIKKEVEDLLRRSEELLKELLDRIRKLLEELKKRHEDLLREVKKDLDEIRR

SEQ ID NO: 13809 - protein, 244 aa, Artificial Sequence; identical to SEQ ID NO: 13808
  Synthetic

SEQ ID NO: 13810 - protein, 240 aa, Artificial Sequence
  Synthetic
DEVEELLKRVRELLKRSEELVRKILEDVKRLLERSIEEVEDLLRKVEELLKRLLDLVERRKLLEEILRELVRLLKEIVRKVLELNRKLVEDVIRIAKRLLELNKESVKEWDRILKLLRDGTVDKKELLKDAEEALEKYERAVREILKELEEIIKEYVRRVEELLKELKDAVDKAKDEVRKEGSDEDLDRDVDRVLKEIMDLLRDLVRRTKELLEELLRLLEELVRRHKELVRKILDEIRK

SEQ ID NO: 13811 - protein, 240 aa, Artificial Sequence; identical to SEQ ID NO: 13810
  Synthetic

SEQ ID NO: 13812 - protein, 247 aa, Artificial Sequence
  Synthetic
REAEELLRELEELLKKSEKVLEDLLRKNRELIKDSKRRLDEVRRKVEKLAEEVEEVIRRGVSEEELIRVIKKVLDDLRRIIKELIEVSRKYLRTTLELVKELLDVSRDVLREVLRIIKALLDTIAKDNKEEKIKEIADVADEIRKLAEEDIRLIKKLLEESAKLVDEDVRKLEEIAKEITELVERLRRTTDKDAVRKLIEELKKLLEDLVEHHERLLKEDHERLKRLLDHHRELLKTVLTILRETAK

SEQ ID NO: 13813 - protein, 247 aa, Artificial Sequence; identical to SEQ ID NO: 13812
  Synthetic

SEQ ID NO: 13814 - protein, 238 aa, Artificial Sequence
  Synthetic
ELDEILRKVVEDSRRLVKELEDILREVIERTERILEEHRDLTRKADEDIRRILEEATRTKTDDELRERLKRLLDETAKLHRDVKKRLEDLNRDLLRLEDEILRRLEELNRRLEEVLRKKNKVSEKILKEHRELLEESRKRLEEIKKEHREMLKRSEDESRKILRDLEELVKEIDDKEDKKPKEEVLKDIVRVLRDVLKKANDLLKTHLDLNRESVKKVVEIARRHVKMNEDSVRKVEK

SEQ ID NO: 13815 - protein, 238 aa, Artificial Sequence; identical to SEQ ID NO: 13814
  Synthetic

SEQ ID NO: 13816 - protein, 238 aa, Artificial Sequence
  Synthetic
DVEDVLREVVERSRRLVEEHKRISEKVIRDTKRILDEHRELTERVIRRAKKLVDDARRTKTDEEVLKRFADLVRELLELHRRVKKKLDELNERLLRAHRTLLERLERLNRELLKLLRERNKVSEEIIRKHEELLKKSRRESEELIKAHETMLEESERRSKKILDEVERLLREIEKKARKKPKEEVLKDAVRVLEEILRKLNELLERHLKLNEESLERMNRILTRHVKLNKESADDARR

SEQ ID NO: 13817 - protein, 238 aa, Artificial Sequence; identical to SEQ ID NO: 13816
  Synthetic

SEQ ID NO: 13818 - protein, 245 aa, Artificial Sequence
  Synthetic
DEEELLRRVTEELKRLLDEARKLHEDVKRELEKLLKENDDLLRDVKRKLERLLEALKRGELTEDEVIERILRLVEELLKRHAETVERILKLVRDLLRLHEKLVKEILDLLTRLLELLERRKGEENREKVDKLKKLAKKVVDEVERSLEELRRLVEEVIKRIRDSLRRSARIVKEAVRELRELLRDVRDKDKLLERIRRLLETLLEVLKRDNEEIKRILEELLRVAEENLRRIKEIIDRLLDATRR

SEQ ID NO: 13819 - protein, 245 aa, Artificial Sequence; identical to SEQ ID NO: 13818
  Synthetic

SEQ ID NO: 13820 - protein, 249 aa, Artificial Sequence
  Synthetic
DEEEVVKRLADVLRENDETIRKVVEDLVRIAEENDRLWKKLVEDIAEILRRIVELLRRGGVPEELLDRLRKVVKRIVEKAEKILERLNRVSKAIAEKLKTIVDELNEVSKEIVKRAEDILRKVKDKETVLRKLRTLVKEYADLSKEVLERVERIVREYVKLSDEVVKSLREIVEELIRIIEDLLRKVNLDEDVKRALEELVKRLRKLLEDVKKKSEDIVREVERIVRELKKRSDEILKKLEDIVEKLRE

SEQ ID NO: 13821 - protein, 249 aa, Artificial Sequence; identical to SEQ ID NO: 13820
  Synthetic

SEQ ID NO: 13822 - protein, 240 aa, Artificial Sequence
  Synthetic
KEREEIRERVKRILETSRKLLEELAKAVEDVLRRSKELIDELRDAVRRVLEELERGGLEEELRRILEEVARILERLIRALEDLNRRAAEILRTLIDLAKKLHDELKRVIEELDKKPKSRELVEEAKRAVERYKRVVEELLDRLREAVERLRRAHEELLRDAARVVKELVDKLREVLKRVDEDRTKKIVERIIELIEELLRLLVKVVEDSVRLIEELLKLAEEVAKRSLKLIEDLLRAIEK

SEQ ID NO: 13823 - protein, 240 aa, Artificial Sequence; identical to SEQ ID NO: 13822
  Synthetic

SEQ ID NO: 13824 - protein, 247 aa, Artificial Sequence
  Synthetic
SDDEVIEKVKEDLRRLIKEAEDVVREYEKRLREVEKKLDEVVKESERLLRELLKKLEAGEKDVREIVRELLEVNKDVLRKVVEIVKELKKIDEDLLRKVEDIVRKLLEVIDEALRRVIESKKDVDRVRKIVEELRRKAEDVLRRIRELVRDLERISDETLERVKKLVKESEDLAREALDRIEKVNTDKKELIKILRDLARKHRELLKRLKELTREHLKRVREILEELLRVTRELVEEIDKILKDLKK

SEQ ID NO: 13825 - protein, 247 aa, Artificial Sequence; identical to SEQ ID NO: 13824
  Synthetic

SEQ ID NO: 13826 - protein, 240 aa, Artificial Sequence
  Synthetic
SEDEVLERIRRALERVEDEHRKVLEKIVEDLKDVLEKHKRVLEEAKRDLERIKEDADKGVPIEELIDKLRRLLEKLIERVRRITELLKRIIEEVARMLKEITDELRRIAEEVVKDTPEDERLKEVRRELEELLKENDKLIKDLVKEAEDLLDEDRKLISKVLRDLERLIEDLRDRLRDSDEKSLKDLLREVLERSKKLLEEHHKHLEEIVRRTKELLERHHRHLKEIIRRIEEILKRERD

SEQ ID NO: 13827 - protein, 240 aa, Artificial Sequence; identical to SEQ ID NO: 13826
  Synthetic

SEQ ID NO: 13828 - protein, 237 aa, Artificial Sequence
  Synthetic
SKEDELREVLERVKRLIETVKRALDEALDRTRRLIEELDKTSKRVLTTVKKLIEDARREDKRELLKKLAELIEEHLRTLEELLRRNKDLLREILELLEELLKELKRLLKELLENQERDEEVKRVLDRIRRLLDEVRKDLERLVEEVRKLHKEIEDRLRELTKRTRELLDKIRRLLEEGVDERDLLRELLRIVKEHVDEVRKLLDELRKVNEKIVDAVRKILEKLLKIATDAIEETRK

SEQ ID NO: 13829 - protein, 237 aa, Artificial Sequence; identical to SEQ ID NO: 13828
  Synthetic

SEQ ID NO: 13830 - protein, 251 aa, Artificial Sequence
  Synthetic
SEKERLMEEIKRVAEELRKTVDRLRERNEKVVRDIRETVREVEREHEDVVKELADRVRELRRTDALERLVKLLLDIIKRLVEESRKLVELVLKIIEDNVRALTELVKRLLRIIEELLRVLRDVEGKEELDKVKKKVRDELKKVEEEAERILRESERLLREVEDTVRRIHEEVERKLREVEKRIEDSNLSEEVREVLRRLTKILRDLLKRNKEIMEKLLRDLKELLKENKKALEDLLRKLEELLRRIAEAEK

SEQ ID NO: 13831 - protein, 251 aa, Artificial Sequence; identical to SEQ ID NO: 13830
  Synthetic

SEQ ID NO: 13832 - protein, 240 aa, Artificial Sequence
  Synthetic
SKEETTKRLLDRHLERDRELLDRAARTNEEILRRNREVLKELFELLKRILDRVREANLIKRELLREAEERVKEILKEVDDINEEYKRELERILDEVDKRNEETKRLLEEIVDELRRTGTTEEVIRKVLEVVRRNLEVHRKLLEDSIRLIRRLLEVTRELLERLIEVIERLLRALLEDKKELEEVLRELRELLKRLKKRLEELLREHEKLLEDYKDRLRKSDDDLRRSVEEIKKALDRLRK

SEQ ID NO: 13833 - protein, 240 aa, Artificial Sequence; identical to SEQ ID NO: 13832
  Synthetic

SEQ ID NO: 13834 - protein, 240 aa, Artificial Sequence
  Synthetic
SKLEDSAEKLKEHLKRDRELLKRAEDLLREILRRNREVLDELRRTLDDILRRIREENLIKKEALDEVKKEIEEVLRKADRANEKIKKAVEDIVRKAEEANRDTEEKVRRILEEVKRRGTTDEIVRALLRVLEENLRVHKELLEELLRVVKELVDLTRDLLRRLIEIIEKLLRLLKEDVKEAKEVLDRLEKLLRDARKRLKELLDEHEKVLEDMERRLRESLDDLRRSLDRIRKDLKRKTD

SEQ ID NO: 13835 - protein, 240 aa, Artificial Sequence; identical to SEQ ID NO: 13834
  Synthetic

SEQ ID NO: 13836 - protein, 243 aa, Artificial Sequence
  Synthetic
SEKERTKELLERLLKLIRELLKKLEDLNRDLLRRVKEVLDRLAELNEELLRRVEEVTRLRDEVDKDELTRRLREIIRRYEEELERIVRELERILTEYEEMVRRLLREIEELIDRVKKELDKLPRTEILEKVKKVIEKILDSIRKVIKASLESAKELLDELRRVAKASVRLVRELLRIAEEVKEKEKLTKLIKEIKERSKRLLEEVKRALEEVMKKNEKILRDVRDDLRRAREELREILREADD

SEQ ID NO: 13837 - protein, 243 aa, Artificial Sequence; identical to SEQ ID NO: 13836
  Synthetic

SEQ ID NO: 13838 - protein, 249 aa, Artificial Sequence
  Synthetic
REEEKLKETLERILRELEKLAKENKELLERILKRDEDLTRENKETLDRLLKRVEEVTRRKEDDDRLREILERIKEEVDRDVRKNEKILKDIEDEVREAVKRNETRLREIKRKVEELVKDLREKLKDVDRARRIVEELKKIIDKVLDDHRKMVRRLLEVIKKLLDLHRESVKKLKEVVKELLDILREVRGDREVEKVLRDIKRKIKEIVDEHRDMNRKIKEEIDRIDTEYKKSLKDIKKEIEEVLDEARQ

SEQ ID NO: 13839 - protein, 249 aa, Artificial Sequence; identical to SEQ ID NO: 13838
  Synthetic

SEQ ID NO: 13840 - protein, 240 aa, Artificial Sequence
  Synthetic
RKEEAIERIRREIEKVRRRLREVHKESEERIRRLEDEYRRALETSAELIRRILDELRKNRVREDDLRRDEELARKLEKLNKELLEALRRIVKKLEDLNREVEKSSEELVEELKRVLDSDLDRDELTEVAKRLKDKLKRILDELRRLHEELKEELERLLKRYAEVIEKLKEDLKRVLAEVTDKRVKDIVRKILRVIEENLKFVAEAVKKLKEIIERNLRLLEEIAKLLLDILEEVLKRLTT

SEQ ID NO: 13841 - protein, 240 aa, Artificial Sequence; identical to SEQ ID NO: 13840
  Synthetic

SEQ ID NO: 13842 - protein, 240 aa, Artificial Sequence
  Synthetic
REKEVIEDIKRLLDEILKRLEEANKETEERLEKLRKEYRELLEDSKRKIKDIEAELRRLNVPEEKLRLVRELVKRLEDLNRRLKKALEDIARRLRDLNRRVKELIKRLLEELKEVAESNLDREEVEKVIRDLIRRLEKILTDLDEVHERLKKDLEKLLEEYERTVRKLLKDLEEVLKRVDKEAVKEIVKRLKEVIKDNLRVVEELVRKLKEIIEDNLRVLREIAKLLKDVLEKLLRDVRK

SEQ ID NO: 13843 - protein, 240 aa, Artificial Sequence; identical to SEQ ID NO: 13842
  Synthetic

SEQ ID NO: 13844 - protein, 240 aa, Artificial Sequence
  Synthetic
DKDKRLEELLKRLKELNDKTFEELERILEELKRANERSLREAERILEELRRRIEERNLDKRLAELLKKLLDDLKRLLEEYTRTNEELLKRLRELLERYRETNKKLLDLLRKLLDEARRTKTDEDLLRRLEDILRKYEDEVRRLLKELEDILREYEDTSRRLLEELERIAKEAAERVSRIKDKDVKDIIRTILEVARDLLRLLEEDSRTNSEVVKRLLDLLREDSKANSEVVKRLLDVLRE

SEQ ID NO: 13845 - protein, 240 aa, Artificial Sequence; identical to SEQ ID NO: 13844
  Synthetic

SEQ ID NO: 13846 - protein, 240 aa, Artificial Sequence
  Synthetic
SKEETLKRLLDELEKRNRETVERLERLLKELEDRNRRSLEELERVLEELERKIEESNLEKELKDTLRRILEELRKLLEEYFRKNEELLRLLRKLLDEYRRTNEELLRLLEELLDTARRTRNDSELLKRLEDIAREYEKRVRRLLEKLKDILDKYRKTVEELVRKMEEILKEAKKTISRIERREVKDIVRKMEEVIRRLIEILRRDVELNLDVAKKLLELLKEDSKLNLDVARELLELLDR

SEQ ID NO: 13847 - protein, 240 aa, Artificial Sequence; identical to SEQ ID NO: 13846
  Synthetic

SEQ ID NO: 13848 - protein, 243 aa, Artificial Sequence
  Synthetic
RELELLDELLRRTERLVKEYLRVSKELLEETLKLLTELLKLSKRLLEETERLLRRDKLGDEEEIRRLIRRAEDSHRRLKEIIDRLFREAEESHRRLEDTIRKLKREAREVLKALERGERSLKEVLDVLDTLVKRLIKVLRDNNRRLEELLRRLVKVLEENARILEDLVRELIRAAREKLRDKSKTELLEEAVKRLETLLRRYKEEIRRVAKRLEELLRELNELSKRLEETLKKLLEDLREDAR

SEQ ID NO: 13849 - protein, 243 aa, Artificial Sequence; identical to SEQ ID NO: 13848
  Synthetic

SEQ ID NO: 13850 - protein, 243 aa, Artificial Sequence
  Synthetic
DEEETLRRLLERKVELAKEYLDVSKEVIDRTTKLLDEYLKTSKRIVDKTVELLERDDLGPKELIKRLKEELERSLRELEEEIKRLKRELEESLKKLKEIIDRLKEEAEKLLRVLKRGEKSEEEALRALAKLVRELIEVLRENDERLRDVLRRLIEALRKNNEILERVLRKLVRAAEERLRDKSLRERLEEARRRLEELLRELNEITKDLERKLEKLLRDLNELTKRLEEELKRLLDELKKRTD

SEQ ID NO: 13851 - protein, 243 aa, Artificial Sequence; identical to SEQ ID NO: 13850
  Synthetic

SEQ ID NO: 13852 - protein, 247 aa, Artificial Sequence
  Synthetic
SEEDELVKRLRELVKELIDAIREHLRRLEELLRELLKALEDHLRKLAELVRRIIEELRRTNAVDDKLLETLDRIVKRVAEEHKRLNEELERIARKVAEESRRLLEELERIVRKVETDIKDLKDKGGDKDAIARLVKELADVARRVVTEHARLVRELARAIKEVVKAHVELVERLLEVIKEVIDRGDVPEELKERIRRIVETIRRSLERLKEEADRIVKEIEKSLRELEERLERIVDTIRKLLEDAKR

SEQ ID NO: 13853 - protein, 247 aa, Artificial Sequence; identical to SEQ ID NO: 13852
  Synthetic

SEQ ID NO: 13854 - protein, 251 aa, Artificial Sequence
  Synthetic
SEDDVLRKLLEAIKKLLKETKEILDRYLRESDRHNKALREILERLLELIKTLLEDLVRRTGKVKDLDKLAEDVKRVRKRLEEILEDNKRKSEEIARRLDKILDEIRKRVEDVVRELERITREVKDKDTLVREVVRLLEELLEVARRVVKRLEDLVRENNRVNNEVTERLVELLKRLLELTDDLLRKLRKDVPEEALKEIKRKLRELEKEIRKVVEDSRRISEESLRRLEKALEDIERILKKLSDEIRTDAT

SEQ ID NO: 13855 - protein, 251 aa, Artificial Sequence; identical to SEQ ID NO: 13854
  Synthetic

SEQ ID NO: 13856 - protein, 233 aa, Artificial Sequence
  Synthetic
DEEEVTKEVERLNRELLKRLREIVEETKDLNRRLLEILEELVRRTEKLLKDVLEIRKRGEKDERVLRDLKRTVEELIKRAKDALERYERDLRRIEERLKKLLDDYRKVLEDITRALPRDEKVERLVRLLERSLEVIEELIRLIVKILRDSLRVVKELIDRIVRIMERILELLRKEKDKDRLREELKKLLEELRRVLEDAKRKSEELSRRLEEVLRRAEEKNKEIMDRIRKARE

SEQ ID NO: 13857 - protein, 233 aa, Artificial Sequence; identical to SEQ ID NO: 13856
  Synthetic

SEQ ID NO: 13858 - protein, 235 aa, Artificial Sequence
  Synthetic
KEKEELLEEVERKVTELKKRSEDLVRKLDEEVKRLEREHEELLKKLRDAVEELRRAKLEIDDLERTTRELTREHEETLRKSLRELERLLEDHVRTIEKVLKDLRKILEDVAKKTRDDERLKELTKRLEEAAERLRRDHERLLRDLERVMRELKKLHEDARRELERVVREVKEEEDRETVLRKIIRLVEELLKILARINEEVKKLIRKLLEILTRINKKMIEVIDELVKIIREAAT

SEQ ID NO: 13859 - protein, 235 aa, Artificial Sequence; identical to SEQ ID NO: 13858
  Synthetic

SEQ ID NO: 13860 - protein, 243 aa, Artificial Sequence
  Synthetic
SEEERTKESLKKVLKALVDLNRELLRKLEENMRELTKLNEEVKRKLKEVLDKVRENGIVDKDAEREAERLMRELDKSSEDTKRETRKLIEESKKSTRRTEEEARKLTETLDRLKEAGLPREDLLRALVRLLEELARLIEEDVRRNAELVKRHIELVERDVRELLRLIKELVDLLRDLAEKLRRTEEIRKIVEEILKEIKELADRYREEVRKSKDKLRRILEDYKRKVDELKERLRELIEEVET

SEQ ID NO: 13861 - protein, 243 aa, Artificial Sequence; identical to SEQ ID NO: 13860
  Synthetic

SEQ ID NO: 13862 - protein, 239 aa, Artificial Sequence
  Synthetic
SLKELAEEVLRRILELLRRIIEIHERSLERSNRTLKKLIDEIERVMREILETLKRALSIKDKEKLKEVRDRLRELLTELLRRAEEIAKENERLLRENKKRLKKIAEELRKLLEDLKRRLSGGPDKLERILREETKLLEDILRRIEEVVKEHEKLNREVLKRLKEILDRTRELLKKLADEDSRDRTLLEEIRRRVEKVIREARETLREHRERVERSIEELRRMLEDVERIVREAIERLRR

SEQ ID NO: 13863 - protein, 239 aa, Artificial Sequence; identical to SEQ ID NO: 13862
  Synthetic

SEQ ID NO: 13864 - protein, 239 aa, Artificial Sequence
  Synthetic
SEVEDILRRLAELNKRLIDKLRELIDRIRRLNEELLRVVEDILRRLKRLADELIRVVRERGDIPEELLRKLEEELKKIVDELRRLVEEYEKALRDLIKELRKAVEEYRRTLAELVERLRRLEEPEELLKDLAEDVRRNIKAVEEVIRRFEKNVEDNIEVVRRLVDALEKLVRRLEKVLRDKLRDEDLKRLLEKLKEDVERVLKEVRDRTRESLKHLEDVIRELEKKTEDSLRHMEERRK

SEQ ID NO: 13865 - protein, 239 aa, Artificial Sequence; identical to SEQ ID NO: 13864
  Synthetic

SEQ ID NO: 13866 - protein, 239 aa, Artificial Sequence
  Synthetic
SKEELVKEALEENVRSVEEVIKLLKDALDENLKVVERVIRELKRALERVKDVIRKLIEQRELLRRAEEELDRLEEELKRILDEYRKRVREIKEKLKKLLEDIRRVHEELERRLRREGPAERLLKELKELNKRIREMTERINREVRELNRALLEKIEDLVRRLVELLERVKERLKDNGRLDKKVADELKKLLDELKKILEEIRRMLEEANRKHDDIVRDIRRVLEENDRKLEKIADDIRR

SEQ ID NO: 13867 - protein, 239 aa, Artificial Sequence; identical to SEQ ID NO: 13866
  Synthetic

SEQ ID NO: 13868 - protein, 239 aa, Artificial Sequence
  Synthetic
SKKEELEKLLDTNLTEIRRLLKRVKDVLDRNLEVVRRVIEELARLLDEVTEVVRRLIDDEKLLREVEKVAEDIKRELERILREYEKLVEDIKRELKRLLEELERAHREIKKEVERDGPDDRVLKKLKELNDDLLRAIKEINDKVKKLNEDLRKKIEKIAREVLKLIEDVKRKLKEKGRLDEKVKRELEKLIKRVKDILDDIRRRLKKVNEEHEREADRLRRELERLDRELKKRMDDIRR

SEQ ID NO: 13869 - protein, 239 aa, Artificial Sequence; identical to SEQ ID NO: 13868
  Synthetic

SEQ ID NO: 13870 - protein, 236 aa, Artificial Sequence
  Synthetic
DEDEELKERTKKSLEKLRRLLERLEKIIRESLDKLRDLLRLLEEALKRILDELRRNNVVSKDLLTELKKLLDRLREEVKRLLEESKELVKELKKRVDELLTESREAVKDLERKVRREEGEEKLLRLVKRLLERHLELSDRIARLVVKILEDNLRLIDELVKIIKELLERVLEVVRRVVRDRDKLEKIERDIRKIIRDLEEIARRLKEDHERVIKELRETVKKHKEDLEEVIRELRR

SEQ ID NO: 13871 - protein, 236 aa, Artificial Sequence; identical to SEQ ID NO: 13870
  Synthetic

SEQ ID NO: 13872 - protein, 234 aa, Artificial Sequence
  Synthetic
REKEDVARRIKRIHDELETRIRKLARDLERIHRKLKEDIERLVREAEKKLRELEKKTTDDKIKTLIDRTRKTLEDLTDEIRRLLKKHLEDLKRLLDDIERVLRRHLRKLKELLDVARRNEVPDKEVRDEIRKSSRELEDILRRLREKLKTLHEEVRRAVERVRKKIEDLEREVRREGVPEEIERLVEELKKILETILKLIAELNEEVVRLLEDILRLVRELNERVAELLERAEK

SEQ ID NO: 13873 - protein, 234 aa, Artificial Sequence; identical to SEQ ID NO: 13872
  Synthetic

SEQ ID NO: 13874 - protein, 243 aa, Artificial Sequence
  Synthetic
DEERIIKTLEDINKKLVEDIKRILDKVRELNERLADAIRKILEETKRILERTTRKVRKDGEISEELLRRLEEKLRKLLEDLERVLREHEDESRRILEEVERLLKRHKDRSKELLDRARDVKDRVKRDKELVDRLKKLIDDSLESVRELIERLKELLDRLVKSVEDLIRTIKELLDRLVEVLREVVSDKDTLRTVEKLVEDVKRRLDKLLEDYKRLIEEVKKELDKLLKEYEDRLREIKKRIDE

SEQ ID NO: 13875 - protein, 243 aa, Artificial Sequence; identical to SEQ ID NO: 13874
  Synthetic

SEQ ID NO: 13876 - protein, 244 aa, Artificial Sequence
  Synthetic
DLEDAIRELLRRLTELIEELVRILEELNKRLNDLVRRLVEILRRINELLKKLVDRLRKDPDASEDLKRVVEEARRLHREALERLKEVVRELRKLHDDARKRLEDVRRELEKRLEDVARRTREDEKLERLRKAIKDILDKLEELLRKHLEDVERILRELEELLERHKRMLEKLLKDLEDLLRRRVEERELKKVLDDIREKVKKTIKEIDEVLEKITRENERTRKEIEEMLRTLRELIKRLLEETK

SEQ ID NO: 13877 - protein, 244 aa, Artificial Sequence; identical to SEQ ID NO: 13876
  Synthetic

SEQ ID NO: 13878 - protein, 239 aa, Artificial Sequence
  Synthetic
SEEDEVAKTLEDILRRLEELLREHHELHRRILEELEKLLRDHIKLHKDILDEATKSTDDLEKLADEVRKKLRESLKTLKKIVEDIERKLEESKRRLKRTVEEIRKKLKELLERIETRNLDERLLRALRELVRLLEEILRRLLELLEEDVRLLKEILRELERLLREDIKLLEEILELLKRRPDSKETLKRLKDRSKELNDRVRETLKRLAERSKRLNEKVEEDVRRAVEELRRLLEEIRK

SEQ ID NO: 13879 - protein, 239 aa, Artificial Sequence; identical to SEQ ID NO: 13878
  Synthetic

SEQ ID NO: 13880 - protein, 227 aa, Artificial Sequence
  Synthetic
DERKVIEDLVEVLRDLLRVIKEVLDRNVKLIKDLLRLNLKVAEELIRVLKELLDRLRRDKDLRELEERIKRVLEEHEDVIRRAAEKVEKVADDSRKVIEDISRKVEALSRRNLEMDTLAELAKEILKLIEDLLRDHKRKTDRLLEELRELTKRTARKLEKILEDIVRKTGETEELDRIRKELKRLLDELTKLHEDVRKKSEELVREAERTLEDVKRKLDELLERAKK

SEQ ID NO: 13881 - protein, 227 aa, Artificial Sequence; identical to SEQ ID NO: 13880
  Synthetic

SEQ ID NO: 13882 - protein, 244 aa, Artificial Sequence
  Synthetic
DEERELERLLEDVRRRHEELLRRLEKLLEDIRKLYEDVRRKLKRLLERVDRLVREILRRDKRDKVREVIKELLEVLRRVVERIEELIEESLRVDERVVEEIKKLIEEHLRVLEEAVDRIKKKKDDEETMREIIRELEEVNRRLDEEVKRLKRENDEVLRRVKEALKRLAEELREALKRLEERTGRDELIKELADIVKEILRLAEELAKELEKINRELDRVTRELIKDLLRISRELIKRLEDTTR

SEQ ID NO: 13883 - protein, 244 aa, Artificial Sequence; identical to SEQ ID NO: 13882
  Synthetic

SEQ ID NO: 13884 - protein, 238 aa, Artificial Sequence
  Synthetic
SDKELLDDTIRKMRKLHRDSVELLDDIRRKLEELLRKVRELLDRNVKKIRELIELRKKTDERELKKRVDDIERENEEALRRIAEEIKEIKKKIDRAVKEYKTELRKLKEKLKDALRRVSDEKVKEVIRRLLEALDRNAELNEDVLRRILEMLERILETIKEIIKKNIKSLRELLELIARGSRDSDLEDLIRRDIEELKKVIEKLEELVRRIEELLREAKERDKESLDRIEDELRKAKK

SEQ ID NO: 13885 - protein, 238 aa, Artificial Sequence; identical to SEQ ID NO: 13884
  Synthetic

SEQ ID NO: 13886 - protein, 238 aa, Artificial Sequence
  Synthetic
EEDDLLKANLDTLRELHKESEKLLRDIEETAKELHKKSEELLKRITDELDRLVKLSRKVDDKVLEELIRRIVREIEKMVEDYERELRDLVRKIEDAVRRYEKKVREIEKRNKEFLKKVTDEKVKEVIERNLKTIRENVELNKEILRRIIEVLRENVRLNREVAKELIRVAEEILKLLRAGSRDSDIKRILDDLRRRLEDALRRDRETLKRLKEEIERVKKEDRRSLERDKEELEKARK

SEQ ID NO: 13887 - protein, 238 aa, Artificial Sequence; identical to SEQ ID NO: 13886
  Synthetic

SEQ ID NO: 13888 - protein, 235 aa, Artificial Sequence
  Synthetic
SAAELILKAAKEAAEANREAAELALKAAEESARAAREAAELALKAAKEAAEAARRGAEDKDTALKLVDEAVRKAEEALRRANEKNRRAVRKAEEAVKRAAEKNRRAVEKAKEAAERGRADEKKKRRLEELAKRTEDAIKRILEELKKLAEDSEEIDRRALKALKELADEAREIAKANLDKDDLTRAADELLKKAKKLADDYKRAADRLLKEAEDLAREWKKLADKALEDAKRDAD

SEQ ID NO: 13889 - protein, 235 aa, Artificial Sequence; identical to SEQ ID NO: 13888
  Synthetic

SEQ ID NO: 13890 - protein, 235 aa, Artificial Sequence
  Synthetic
KAEEAAKEAARLAKEDADLAKKAAEDAAELHERHAKLLEDSARTAAELAKRLAEAATVDEAARLLKKAAEDYKKAADEAARLNREAAKEAEKAARDAAKLNREAAEDVKRAAKDRLREAVERAKEALKRSLDLAKEAVERSKEALKRSVELNARAVEIAKEALKEALRIAAERAERKEDLDRLAKIAKEAADALEELLERSKESAERAARALEKLLKEWADSAKKAADALEELDR

SEQ ID NO: 13891 - protein, 235 aa, Artificial Sequence; identical to SEQ ID NO: 13890
  Synthetic

SEQ ID NO: 13892 - protein, 237 aa, Artificial Sequence
  Synthetic
DELETLKKEAEDVLRELRDILRKLEDLSRKTIEDMRRIVEEVLKLNEDSIRELKRIIEELDSKDLMDTVEKVVKRNLEIAERVIERLLELVRRNADIARRVIEELLKVLERLADIVRKRIKSEVLREIKRVAEEVLKKVREVLKRHEDAIRKVLERVRDVAREHRRVVKEVLEDVKRAGGLTDEVVKKLEDVSRKSIDDLRKIIETLREVVERSIEEIERIIRDLERVIREIIEREK

SEQ ID NO: 13893 - protein, 237 aa, Artificial Sequence; identical to SEQ ID NO: 13892
  Synthetic

SEQ ID NO: 13894 - protein, 240 aa, Artificial Sequence
  Synthetic
SKIEELAKIAEEHAELNRRAARKNNEIAKEAAELWKRAAEKHVRIAERAADAIRKAAKSEAAKTALKLIKENAEDAKEAARRALELAKESAERNTRAAEEADKLSKDAARTAREARREDALKKAADKAAEASRRAVELNKKAAEDHHRANETAARLAERASRHLIEALERAVRAAARELEDEKALREAKELAERAARENREALKEAKELAKRNSEKAKESAKEHKKLAEDANKRAEEATR

SEQ ID NO: 13895 - protein, 240 aa, Artificial Sequence; identical to SEQ ID NO: 13894
  Synthetic

SEQ ID NO: 13896 - protein, 240 aa, Artificial Sequence
  Synthetic
DEEEVIEEILKTLEEINRRVLKLIKDILEKVKRVDDEIKTLVKEVLRENERVLREVREKAKVKDLVKELLKRVREVAKIHREIVRRHLEILERILEEVAKVVEEHIDALRRILELLERVIRDEEVVKEVRKLVEDVLRASREVLERVTRLAEELIRESKRVLDTSRKLIEEIEDRLRKVRSEKMLEDILRRLEEINRTSLRLVDEVSKKTREVLERILKLVKEVLDESRRVAKKVKDDLK

SEQ ID NO: 13897 - protein, 240 aa, Artificial Sequence; identical to SEQ ID NO: 13896
  Synthetic

SEQ ID NO: 13898 - protein, 229 aa, Artificial Sequence
  Synthetic
SAVDIAREAARRVIELLKRSAEAAEEAARRSIKLAKESADAAREAAKKVIEILKRAADEDRALKEIEDLARELRKASKEVLEEDERLARELEEISRRVLDEIRRLAKELEDKATKKKAEKAAREIERAAKEHLEVNKRAAKRSKDATERHLEANDEAAKRIRDAADEVRKRGEEDAARKAAEIAARAAKRSADTAKRWAEVAKEAAEESAKSAKKAAKIAEDAAREIEK

SEQ ID NO: 13899 - protein, 229 aa, Artificial Sequence; identical to SEQ ID NO: 13898
  Synthetic

SEQ ID NO: 13900 - protein, 231 aa, Artificial Sequence
  Synthetic
DLREAAKEAIDAAEEAARRTEEAAKENIRALEEAAKRTRDAVRRAIKAIEDAVRDAGSTDEAVKIVEDAARDALRASKESIDIVREAAKRSLDASRESIKIVEDAAKKAEDAARKAGRDASRAAELAKRAAEADKRAAEEDARLNEEAARADRRVAEELARLAEEVADAAKKADKREDLERIAREAAERAKELADRLEEIYRRAAEESKRLAEELKRIYKRAAEEAKKAAD

SEQ ID NO: 13901 - protein, 231 aa, Artificial Sequence; identical to SEQ ID NO: 13900
  Synthetic

SEQ ID NO: 13902 - protein, 242 aa, Artificial Sequence
  Synthetic
SKIEELMKLVEKIIRKTLDLVRKHAEVSKEVLKEYIRISKEHLDVSKRVAEELKKEIEVKRLLEEVERVAKKVVETNKRNIETVERVLEDIKRTNTELLKRIEDVLREAVRVAEVLRRGDSDKEEVVRRIKELLKELLKVIREVVEKDKRLLDELLKSNADVVRTDEELLRRLLRVVERDVERKEDLDRIRDTLRRVIERSKRIHDRLREMLEEVKRRSEEIVERIERELRDVARKLEETLR

SEQ ID NO: 13903 - protein, 242 aa, Artificial Sequence; identical to SEQ ID NO: 13902
  Synthetic

SEQ ID NO: 13904 - protein, 243 aa, Artificial Sequence
  Synthetic
SLTEELRRVVKEIEEVVRRDVRTLEEVVKKITEVVRRDDKSLREVVKRNEELVRLLARGDRRDEDVLRAVAKSNKELLDSSREVLKTVADLLRRLLESSKRVADRVEELARRLLKMVKDSGKDDRKLREKLKKILREYRERLKEVAKKIRDALKRYEDILREIEKKNRDVLKRAEELRSKDTSEKDRREILRELVELTERSVEEIARVNKELVDIVRELVKELKRLNERLVELVKRLVEETAT

SEQ ID NO: 13905 - protein, 243 aa, Artificial Sequence; identical to SEQ ID NO: 13904
  Synthetic

SEQ ID NO: 13906 - protein, 241 aa, Artificial Sequence
  Synthetic
RAIETLVDVVREAIEINKRLVDRNVESNKELAKLNRDLVRRNRESNTELADLVRRDKDVDRLREEAKRVLEENKRLLDELRERHERVLKRNEDLLREVERLHTRILRDLREIVRRDNSRKEVLERLERVVRDILRSLKEVLDENAEVVKRILKSLEDALRENERVVREVLELLKRVRDQDREEELKRVVDEIVELLKRVLETTEKVVRDNVRLLEKALRSSKKVLDENVKKLEDVLRDLKR

SEQ ID NO: 13907 - protein, 241 aa, Artificial Sequence; identical to SEQ ID NO: 13906
  Synthetic

SEQ ID NO: 13908 - protein, 241 aa, Artificial Sequence
  Synthetic
SAAEALAKLAKENAELNRELAERNARSNKELAELNEEAARRNAKSNKELAELARRERDVDELRRRAEEALRRNKELLDKVRRDHERALRRNKKLAKEAEERHKKSLEDAKRIAKRDKAREEALRSAEEAVRRALKSLKDALRSNEEAVRRALKSLKEAADENEKAVKEALDLARRARDDDTEEELKRAIEEAAKLLKRAADETRRAAKENAEALEKAARESKEAAKDNAEALKKAAEEAKK

SEQ ID NO: 13909 - protein, 241 aa, Artificial Sequence; identical to SEQ ID NO: 13908
  Synthetic

SEQ ID NO: 13910 - protein, 232 aa, Artificial Sequence
  Synthetic
TEEEVVEDVKRVLDESHDDLRRLIETLTRVLRESLKRIKEALEELERVLKKLLDLLEGGRDKREVLDEIRKVLERLREVIEELLRINKEVLRELERVIRELLKKNEDLARRVRRDVKSRLLEVLERLARESLELNRRILEELRKLVEKSLRAVEKILKRLEEIVRKLLKLVEDNKPREEVKRVLEEARDELRRLLEEYKKIIEELERELERLLREHREVIRRIKEEIDKSSK

SEQ ID NO: 13911 - protein, 232 aa, Artificial Sequence; identical to SEQ ID NO: 13910
  Synthetic

SEQ ID NO: 13912 - protein, 234 aa, Artificial Sequence
  Synthetic
SEVERAVEDVKRALEENVRLSKELVDRVTKMAEDNVKLTKDIVDKVRRILEELVEVIERGGSDDTRRELIDKARRLLRKLRDELKESLDDARRLLEDIKRLIEESVKRLRDLLEKIRREKSLPEDLLRLLREVLEELKKINDELLDAVRRVLENSARVLETLLKLIEDVLRELERVTDKDEVRKIVRELVEEAKKVVEYDTENAKRVVEELKRVVKRDADVVRKLVELLDRKAR

SEQ ID NO: 13913 - protein, 234 aa, Artificial Sequence; identical to SEQ ID NO: 13912
  Synthetic

SEQ ID NO: 13914 - protein, 235 aa, Artificial Sequence
  Synthetic
SELEEAVKRVRDALRENLDSIRRLVEKIRRVLEEHNKLSKELVDRIEEVLRRTVEAVKKDKPEEDLRRDLERVLEELTRLVDEVRKTNERALTELEKLVRDDKRKLEEVLRELRERLVKIEELLRRLEEVIRRSLRSLEELLKLLERVSRELVEVLRELLELLRKVVKRLLDLLRKGSDKRDVARVVRELIELVKRVLERDKRIVDELVKLVDEVLKRNKEIVDELVRLVDEARR

SEQ ID NO: 13915 - protein, 235 aa, Artificial Sequence; identical to SEQ ID NO: 13914
  Synthetic

SEQ ID NO: 13916 - protein, 238 aa, Artificial Sequence
  Synthetic
SELEDLIRLLREVIKRLEESVKELVDIVEEAIERLRKIVKELIDLSRKVIDELLELGVEERVIKKAKEASEEALRKLEDVIRKLKKILEDVLKKLKESIDELLREVDELLKRPQDKEVLREILERLRELLRRHTKVLREVIKEIADALEEVLRVIEEILDLHRRLLDEIRKVLERAGLPEELLDRIRRLIEESIKKLARIADRLRKLIEDLRRLLEELLRRNEELIERLERMLDEKAR

SEQ ID NO: 13917 - protein, 238 aa, Artificial Sequence; identical to SEQ ID NO: 13916
  Synthetic

SEQ ID NO: 13918 - protein, 238 aa, Artificial Sequence
  Synthetic
SEKEEAAKAAEEAAEIAERADEKAARSSKEAAKIAEKADKEAAESTRKALDDARRALEEAPADTRARDLARKLAREAEESLKEHKKISEELKKRLDESLKEHREISERLKKELKELREADRDLDELARELERLAKEHADSLREHARRSRELAEEHVKSLKRHAEESEKLAERAAREASDEDAARRAEKAARENADSIRRAAEKSRKAAEDNARSIEKAARESEEAAERAARILKRAKD

SEQ ID NO: 13919 - protein, 238 aa, Artificial Sequence; identical to SEQ ID NO: 13918
  Synthetic

SEQ ID NO: 13920 - protein, 229 aa, Artificial Sequence
  Synthetic
KEVEDVVEKLRELIDRALDRNRKVVEEVRDVVRRALEENRKVVEEVRKVIKEILDRVDDETVRTVVELLERLLDEHLRIVEEIVRLLTDLLRRHLRVVEDIVRLLRELLKILTELRRREELEKIARRLLETIDRLIRTLERLYDEAREEIEKLIRELERLYREVDKRIKEAGLPKEATDLIRELIERLRKVLEKSRRLIDRLVKLSRDVLEETKRLVEELIREVKRAET

SEQ ID NO: 13921 - protein, 229 aa, Artificial Sequence; identical to SEQ ID NO: 13920
  Synthetic

SEQ ID NO: 13922 - protein, 240 aa, Artificial Sequence
  Synthetic
KLEEIVKKLEDLNKKAVEILRRVLEEHEKLVEKVKKVLRDVLRLLEKVVREVIETLKKKDTDEKVREALKELEEVVRKIKEEVEKVLKRLEEVSKRLKDEVRRVLKESEDVAKKIRRDVRRVRSKDAAKRATDLLKETLRILEEAIRRIVKVIEDSLEILREAVERIVRLLEELLKILARIGLDEEVLRKLKEIIKELKDRLKKLLDDYERIIDELRRELERVLREYEKILEDLRKELED

SEQ ID NO: 13923 - protein, 240 aa, Artificial Sequence; identical to SEQ ID NO: 13922
  Synthetic

SEQ ID NO: 13924 - protein, 237 aa, Artificial Sequence
  Synthetic
SELEEAAKALERIAKKAAKAARDWAEEDRRLAEEAIRAAEEWAKENKKLADELAKAAKDNRDEKDLRRILEEVKKRSEKLAREAKKVLKRIADDSKRLAEEAEEVLKRAADELKKIADELRKRGAGAKEAEDVAKKALDAAREAVEEAKDVNREALKLAEEAVREAERVNREAARLAEEARSDEAVRALEEAAKRSEDAARKAAKLARDAAEKSRRAAEKAIRLLEEAAKEAKDAAR

SEQ ID NO: 13925 - protein, 237 aa, Artificial Sequence; identical to SEQ ID NO: 13924
  Synthetic

SEQ ID NO: 13926 - protein, 239 aa, Artificial Sequence
  Synthetic
KEAEEIAEAVKRLAEASAKTAEELARAVRKAAEDLVKLAKEHADALRTAADRIAKLIEAEEAARKALEAAKKAIEDNERAAKEALEAAKRAIDIIREAAERSKKAAEEAIDIIRRAKEGREDIERALRELLKANRKAVEDAKRALKELADAAREAVKKAKETAERLIEAIKRAADEAPASEDIRREIKRIADELKEITKRLEDEVEKIIRRLEKIAKEAEDRHRKLAEELRRIAEEAKR

SEQ ID NO: 13927 - protein, 239 aa, Artificial Sequence; identical to SEQ ID NO: 13926
  Synthetic

SEQ ID NO: 13928 - protein, 241 aa, Artificial Sequence
  Synthetic
SVDEALEELVRRLLEVLKTVLERTKELSRDDLRVVKEVLRIIEELVKRLLKVIRDGLDDADRVLEEVERVIREAKREVKRWEEVVRKVVEDSRRLIERVLREVEEVIKEAKRLLDERKLGGRREVIEELLRLLREIVRHHKEVSDEHLKLSAELVKRILDVVEETLRLATEIVRRIKEEGNSEDVRRDIERLLEELKRRVERLLEDIERLLRELEKLNEDVLRENKKLLEDLERRVRERKK

SEQ ID NO: 13929 - protein, 241 aa, Artificial Sequence; identical to SEQ ID NO: 13928
  Synthetic

SEQ ID NO: 13930 - protein, 237 aa, Artificial Sequence
  Synthetic
DEERIVREIVKIIEEAVKELVRLVREDIELVKDVVRRHNRLNEEIVKLWKELVDEVLKSRDAEELRRILERIKRLHEENSRRLKEVVERWVKLLKESLEKLEDVARKAREKLKTVLDKPRGEELIKDLARVVEEVLRLLEEVIKTHAEINKRALELLKEVSKHAADIVREALKLAAEVVDDKDLLRRAEEEIRRLLKENEDILKRVEEEVKKSNEELRRILDRVRRELEKALKRLRD

SEQ ID NO: 13931 - protein, 237 aa, Artificial Sequence; identical to SEQ ID NO: 13930
  Synthetic

SEQ ID NO: 13932 - protein, 243 aa, Artificial Sequence
  Synthetic
SKEEEVKRLIDELKRVNERVNKTIKELVKLLEESHEEVLKEIERLIREVLRVIKEVIEAVDKDRKLERLEEKVRKVVEELKRLLDRSRRILRELIKTIDRLLTEHRKEVDKVVRELRELLRAGADAKELLKILEDLLRKSKEVVKRILDIIRKLLEDSRKVVEELVKLIADLLEEILRALKEGRKEALDKLVDAARRVLEAVRDVLRKDERSVERVLDEVRRVAEELERTHREVVKRVEDAAR

SEQ ID NO: 13933 - protein, 243 aa, Artificial Sequence; identical to SEQ ID NO: 13932
  Synthetic

SEQ ID NO: 13934 - protein, 243 aa, Artificial Sequence
  Synthetic
DKEKTVADLIEKVERSHERVLKRLAELIEELKRVNERVNREIERLIRELEEVIDRVIKAVDPDKKLEELEKKVREVSRRLEEILRDHERLVRKVVEELKELLDRSRRLVREVVRKLKKLLEDGSDAKDLLRIIADLLRLSDEVVKELLKLNEKLLKLSEEVVREILKLVKDLLEDLKRALEEGRREMLEELVRVARRVLEAIKTVADELRKRHEEVSREIERVAEEDKRTVEEVLKRIEDAAR

SEQ ID NO: 13935 - protein, 243 aa, Artificial Sequence; identical to SEQ ID NO: 13934
  Synthetic

SEQ ID NO: 13936 - protein, 233 aa, Artificial Sequence
  Synthetic
KDEEIIKRLEDLLKENVDRLREILERVERTHRKVIEELKRILEELEEILRRVIEKLRRKNTLDDKLIKKIEEVLKRLLEVLDELLKRIEKASRESLDSTRRLLDSHEKVLREALRVLREIDGERVLEEVKRVVEDVIREWEEALERNKRVVEKLIKTVEDILKRIDEVVRRLIEAVESRDVERLLKELKRIVEEILRLVRELVTRDIDALRRLLESVRRLVDKLIRIVEERRR

SEQ ID NO: 13937 - protein, 233 aa, Artificial Sequence; identical to SEQ ID NO: 13936
  Synthetic

SEQ ID NO: 13938 - protein, 242 aa, Artificial Sequence
  Synthetic
SDKDRLLEEIKRLIDESRRKAEEILKRSTELLEDSKRDLREILRRSEKILDELLDLIRRNELPEKDLLRELEEVVKENLELAERLSKKLEDIVRENRDLLEKLSRLLVKILKEIVKMVEEAGLDEELTKLIEEVLEDNKRAVKELEEKLKESLKRNKRVVDDLRDKLRKSLEELKDVVTRLRSKEIKDALRRVLEKHKKVLREAIKKHEESLEEHRKVLEEIIELHKRSLKKLEDVIDTVRK

SEQ ID NO: 13939 - protein, 242 aa, Artificial Sequence; identical to SEQ ID NO: 13938
  Synthetic

SEQ ID NO: 13940 - protein, 236 aa, Artificial Sequence
  Synthetic
SKEELIKELKETVKRIIKLLEELSKKMEEIIKRIAELLRELSKKLVDIIKRIIELLRREGAEEEIVKRLDDVAKKNNEAVREIVEELRRIVKENREAVERVAKRLRDVLREVDRVVKELTGEDLKRELDRVLKLLLRILEDAVRELKRSLDEVRKVLKRVVEMHRTSLKELEDILRKVDVREEILKEIKRLLDESKERLDRVLREIEELLRRYEEEVRRVLEEIKKILDELRERIR

SEQ ID NO: 13941 - protein, 236 aa, Artificial Sequence; identical to SEQ ID NO: 13940
  Synthetic

SEQ ID NO: 13942 - protein, 234 aa, Artificial Sequence
  Synthetic
DTERAADEARRRLEKLARDHKEKLKKAAEDLRRLLEEAERAHRKIEKELEELTRKVRDLERAAEELLKLAEEAAKASEEAARRLLEIAERIAKSNEDAARELLKIAEDLARRAEKEEAARRLLEAAKRAAEDSRESAKDLLRAAREAAEKIKKSARELLKAAEDAAKTIRDAKDREDAERALKEAADRAREALRRNLRALREAVREAEEAIEKDARAIDEALKKAREAIEEAER

SEQ ID NO: 13943 - protein, 234 aa, Artificial Sequence; identical to SEQ ID NO: 13942
  Synthetic

SEQ ID NO: 13944 - protein, 238 aa, Artificial Sequence
  Synthetic
SKVEELAERAARSHKELADAIRELAREAAESHKEAAEVVKRLADEAARAAKEVAKAIEDETAAKILEEAAREALRAAEEAIKLLEDSAREVLRLAEEAIRLNEEAAKRVLDAAREAAELEDKEAVDRALKRALKISRDALEEAKKIAKEALELSKRAADEAARIAKEALETAEDALRKAVRDRKVLEDAKKILEDLRKKAEDALRKHKKILDELEEKAKKAAEKHERILRKLDEDAKR

SEQ ID NO: 13945 - protein, 238 aa, Artificial Sequence; identical to SEQ ID NO: 13944
  Synthetic

SEQ ID NO: 13946 - protein, 242 aa, Artificial Sequence
  Synthetic
SEDEEVLKDIKRLLEEVKKTLEEVAKRHEKALREIEERVKEIVKEHEDLLKEVEDKARSNTIDEKDLVEMLRRIHERTVKLIDELVKTLLRLNEETVKALEDLVRKLLKILKDVLERVKDKRVLDLIRELIKKVKDDADKLLELLREVIKRSADIAKEIRDLLDKVIKDSERILDEARRLKNKEDLDRLLKEVLDISRKVLEEVLKIIKRVLEISKRVLEEILRRIEKVLRDIDRVLKKLRE

SEQ ID NO: 13947 - protein, 242 aa, Artificial Sequence; identical to SEQ ID NO: 13946
  Synthetic

SEQ ID NO: 13948 - protein, 238 aa, Artificial Sequence
  Synthetic
SREEDLARKIAEAVKELLDADRRLLREIEKLAEELLRINEELLRRLEELARELLEAVDDERVVDELRRVAERIRRVVERATRELKRVLDEIRRISEKSIRDLEKVLEEIRKIIDDVSRLERKEEVLRVIKEILERLEKVLEEVRDVNRKILERLKEVLEEWERINRELLRIAREVLEKVKVEERLLRKLEEILRRLKDESRKVLKKVKEILDRLKRETEEILDKVRKILERLEEEVRR

SEQ ID NO: 13949 - protein, 238 aa, Artificial Sequence; identical to SEQ ID NO: 13948
  Synthetic

SEQ ID NO: 13950 - protein, 238 aa, Artificial Sequence
  Synthetic
SAEEAAEEALRRAAEAAKESIKAAREALEEVRKAAEKSIRAAEKALRDVKKAAEEAKSAKDEETAKRAAEKALKALKEAIEINAKAAEEALRALREANRINREAAEKALKAAKEALDRANLPDKKLKTAEDLLRKAKKEVEDANRRSEKLIREAEERVRRALKRSKELLKKLEDDARRERAIEEAAKKAIDLARDHARLVKKIAKDLIDLAKEHADLVREIAKRIIEAAKRIAEIVRK

SEQ ID NO: 13951 - protein, 238 aa, Artificial Sequence; identical to SEQ ID NO: 13950
  Synthetic

SEQ ID NO: 13952 - protein, 230 aa, Artificial Sequence
  Synthetic
SDEELLEEIKKILDEVLKKNADAVRSLEKVLDKVLEDNARAVEELKTVLDKVLRDLERRGVGDEEIRELLERLKRELDEALKELAKEYEKLKETLRRVLEELADLYREAKERADRDPDKRKIVEELAKLLDRDVKLNRDLARRVLRLLERDLRVNKELVDRAREVLDEILKRNEDKDVEEVVKEVRDVLRESVDKVRRVIEEVKRVLDRSSEEVERAVEEVKRVLDKVRK

SEQ ID NO: 13953 - protein, 230 aa, Artificial Sequence; identical to SEQ ID NO: 13952
  Synthetic

SEQ ID NO: 13954 - protein, 239 aa, Artificial Sequence
  Synthetic
SDEELLERVERLLRELLDTNRRMLEEVEKELRRLLETNKKTLDDVRRLLKELLDVLETRGVKDEKRLRDIRRRLEEVVRRLDKLHRDIAEDLKRVKERLDRLHERIKRRLEEVVKELRDLKDRGVDERKVLERAAEVLRELLELLRESLEEIERIIRRLLELHKRSTEEAARALEELLRGLEGSDDLRELKKRIEDLLKEDKERLEKIARDIERDLERYARDLKRLEDELREDIERARR

SEQ ID NO: 13955 - protein, 239 aa, Artificial Sequence; identical to SEQ ID NO: 13954
  Synthetic

SEQ ID NO: 13956 - protein, 239 aa, Artificial Sequence; identical to SEQ ID NO: 13954
  Synthetic

SEQ ID NO: 13957 - protein, 239 aa, Artificial Sequence; identical to SEQ ID NO: 13954
  Synthetic

SEQ ID NO: 13958 - protein, 238 aa, Artificial Sequence
  Synthetic
EEDERLTKRVEEIKRENRELLRRLEEEVKELERKSEKIVRDLKEKVDRAKEKLDSGKGSTELLVEELEKLIREILKLSEDHNRTLEEVVRKIEDVLRANLERLKELVDEILKALKERGKGDSEELKRKVEKVARDYERLLRKLREVVKRILDESKRLDEELEERLKEVLKKLEELIKRGGPDKDVLTELKRILDELLKLVEKLIRRNLRLLEELLRLVREILRTSNEILEEILKDARR

SEQ ID NO: 13959 - protein, 238 aa, Artificial Sequence; identical to SEQ ID NO: 13958
  Synthetic

SEQ ID NO: 13960 - protein, 238 aa, Artificial Sequence; identical to SEQ ID NO: 13958
  Synthetic

SEQ ID NO: 13961 - protein, 238 aa, Artificial Sequence; identical to SEQ ID NO: 13958
  Synthetic

SEQ ID NO: 13962 - protein, 245 aa, Artificial Sequence
  Synthetic
TEEEVLRKVEKLIKDLLDVLRDLLRASEEVVREALRVLEELIEENKRVIEELSRALSGGSRESVESALAKNEERLKKILEDADRVLDKWRRLLEELSKKAKAVLDEVRKRLEEIKREVPETEKLRTLLTILEEILRALEKIIRDILRINERLLEKLKRILERLRETNREIDERIRKLVEEARGGSEEKLRRDLTETKKELEKRHEDLRRELEKLLRDYKRELEEIERALEEIEKTLKRRADETRR

SEQ ID NO: 13963 - protein, 245 aa, Artificial Sequence; identical to SEQ ID NO: 13962
  Synthetic

SEQ ID NO: 13964 - protein, 245 aa, Artificial Sequence; identical to SEQ ID NO: 13962
  Synthetic

SEQ ID NO: 13965 - protein, 245 aa, Artificial Sequence; identical to SEQ ID NO: 13962
  Synthetic

SEQ ID NO: 13966 - protein, 234 aa, Artificial Sequence
  Synthetic
SAKETIRKLIEENKDIIRKLAEKLKRLLEESERIAEEALRLIKELLERIERALRRVGSGIDEELLKELEKELARLEEELKEILDRVRDLHRRLAEEIRKILEESKKLNEELEDRLRKDGDVEELLELLERVHATDVRLLRELLKLLKKVHEDVVSLLERLLELLKRVLDRIVEELGLSDKELEKLLEDLEREIRRLAKRLKELSDRLEEKIRKIKRELDDLSARLREKIERTRK

SEQ ID NO: 13967 - protein, 234 aa, Artificial Sequence; identical to SEQ ID NO: 13966
  Synthetic

SEQ ID NO: 13968 - protein, 234 aa, Artificial Sequence; identical to SEQ ID NO: 13966
  Synthetic

SEQ ID NO: 13969 - protein, 234 aa, Artificial Sequence; identical to SEQ ID NO: 13966
  Synthetic

SEQ ID NO: 13970 - protein, 238 aa, Artificial Sequence
  Synthetic
SKEDKARELEKRLRDNLKKLEEVVRELAEVLKRNLEKLRRLAEELLRALKRLLDKLRAGGLPKDELEDLRREVEDVLRRLEDLLRKLKKANDESLTRLEELLRRAEEENRRVLTTLRELLRGNGDDRDLARLVARLVEANNRALEELLRLVAKNVEDNNRVLEELLRLVKELAKRLLGRIRDEDLVRDIRRELKELEERARKILRDDERDLRALEKRIRDIIREDREELERLKERARK

SEQ ID NO: 13971 - protein, 238 aa, Artificial Sequence; identical to SEQ ID NO: 13970
  Synthetic

SEQ ID NO: 13972 - protein, 238 aa, Artificial Sequence; identical to SEQ ID NO: 13970
  Synthetic

SEQ ID NO: 13973 - protein, 238 aa, Artificial Sequence; identical to SEQ ID NO: 13970
  Synthetic

SEQ ID NO: 13974 - protein, 243 aa, Artificial Sequence
  Synthetic
KREDILKKLEDIIRDIIDKLRRILEKVKRLNEDIIREIKRLLDESLKTLEDLLKRIADKSRDRELEDILRRVLEKLRRSLDKLRDTLRKLKEETDTVLERAERTLKELKDRLEKLLRDGEKVSEEDLVEALKALIDELRKVLEDVIRVSKELVERLLRALREHLETNKRLVKELLDALRKTTGDDEEIKRLKEELERRHRRLEEEVERVARELEKAHRDLERDIRRVAEELKKLLKKLRDDRR

SEQ ID NO: 13975 - protein, 243 aa, Artificial Sequence; identical to SEQ ID NO: 13974
  Synthetic

SEQ ID NO: 13976 - protein, 243 aa, Artificial Sequence; identical to SEQ ID NO: 13974
  Synthetic

SEQ ID NO: 13977 - protein, 243 aa, Artificial Sequence; identical to SEQ ID NO: 13974
  Synthetic

SEQ ID NO: 13978 - protein, 236 aa, Artificial Sequence
  Synthetic
SAEETVERLLEEARKRHEEIIKKAKELLDRAREEHERIIREAEKLLEEIKKRVDELVRDGQPAEEVLRDLERVVEEILEVLRRLLDANRRVVDDVLRVLEELLRVNEEVNRRIIETIGLPEEVVEELKEENKRLRDRLDKLVKDLKKTNKEIEDKLRKLAEELKEELERIADRIRKTGTDRKTLLREIEKLLKTLEDILRDLLRLVEKTLKELEEILKDLVDKARENLKRLRERIR

SEQ ID NO: 13979 - protein, 236 aa, Artificial Sequence; identical to SEQ ID NO: 13978
  Synthetic

SEQ ID NO: 13980 - protein, 236 aa, Artificial Sequence; identical to SEQ ID NO: 13978
  Synthetic

SEQ ID NO: 13981 - protein, 236 aa, Artificial Sequence; identical to SEQ ID NO: 13978
  Synthetic

SEQ ID NO: 13982 - protein, 239 aa, Artificial Sequence
  Synthetic
SEKEELKRLLDKLLKELKRLSDELKATIDKILKILKEVSEEVKRTADELLDAIRRGGVDEEVLREIKREIEEIEKKLRKVNKEIEDEIREIKKKLDEVDDKITKEVEKIKEALDKGGVDAKEVIKALKEILKEHADVFEDVLRRLKEIIKRHRDVVKEVLEELRKILEKVAEVLKRQGRSEDELRKVEEDLKRLEDKLKKLLEDYEKKVRELEETLDDLLRKYEETLRRLEKELEEAER

SEQ ID NO: 13983 - protein, 239 aa, Artificial Sequence; identical to SEQ ID NO: 13982
  Synthetic

SEQ ID NO: 13984 - protein, 239 aa, Artificial Sequence; identical to SEQ ID NO: 13982
  Synthetic

SEQ ID NO: 13985 - protein, 239 aa, Artificial Sequence; identical to SEQ ID NO: 13982
  Synthetic

SEQ ID NO: 13986 - protein, 244 aa, Artificial Sequence
  Synthetic
SDAERLVKKIADSLRAYEDLLRKLVERIRDLLRAYEEELRKLLTEIEKTLEDVRDVLRRGNVDERAKEVAKRLVEAVKSLIEIVKRILEKTARVVKKLEDLLRRAAELNRDVVEKILEIIKRGGPEDDFRRIVRRLEELHREVEDAVRKLVEDLKRLHREVVEELADIIRKLDKLLAEVERDIDLGDLLEALRRLVERLKRLIERVLKLNRELVKKLLELLEEALRANRRLVEDILKIADEARK

SEQ ID NO: 13987 - protein, 244 aa, Artificial Sequence; identical to SEQ ID NO: 13986
  Synthetic

SEQ ID NO: 13988 - protein, 244 aa, Artificial Sequence; identical to SEQ ID NO: 13986
  Synthetic

SEQ ID NO: 13989 - protein, 244 aa, Artificial Sequence; identical to SEQ ID NO: 13986
  Synthetic

SEQ ID NO: 13990 - protein, 247 aa, Artificial Sequence
  Synthetic
SATERVLDLARDLIRILLEIHKRALKLIAELVSKLLKIHEDVLKLSEELVEELLEIVKRGLPREDLLRALKELLEKIEDVVRDIERRHRDLLREAEEVVEKLKREHEEVKERIERAVKKLAEDGVDKDKLKELVDVLEEILRLSKTTLEELVKALRDVIRASLEALKENLRILRKIIRELEGLEGVDEDTLRRVLERIREEVERVKEKHRRLLEELKKLLEELRARSADLLEDIKRKVRELEEKTRR

SEQ ID NO: 13991 - protein, 247 aa, Artificial Sequence; identical to SEQ ID NO: 13990
  Synthetic

SEQ ID NO: 13992 - protein, 247 aa, Artificial Sequence; identical to SEQ ID NO: 13990
  Synthetic

SEQ ID NO: 13993 - protein, 247 aa, Artificial Sequence; identical to SEQ ID NO: 13990
  Synthetic

SEQ ID NO: 13994 - protein, 244 aa, Artificial Sequence
  Synthetic
SAEETLRRITEESKRVLEEITKKYEDLERESREVLRKLREDLDRIKRELEDVLTKGGDDKDEVLTVLEKVLDELLKLHRENLRVIKELLRKVLEVDRENLEVLKRLLEKARDLLRRSGRDEKDLKKLEDELRKVKEELEKKHEASKRDIEDLERELDKVTEEVERLLRKLKEELRRAAEGSDEDRERLARLLKALADKLIRVLEEILKINEELNRKIIKFARENLERNRRVNKKVIEVLREAAR

SEQ ID NO: 13995 - protein, 244 aa, Artificial Sequence; identical to SEQ ID NO: 13994
  Synthetic

SEQ ID NO: 13996 - protein, 244 aa, Artificial Sequence; identical to SEQ ID NO: 13994
  Synthetic

SEQ ID NO: 13997 - protein, 244 aa, Artificial Sequence; identical to SEQ ID NO: 13994
  Synthetic

SEQ ID NO: 13998 - protein, 250 aa, Artificial Sequence
  Synthetic
STEEILKRVKEILDELAKELRDIIRESLRTIEELLDELRRILEESERTLEELVKTIKDGVKDSEELLRRLKRLLEDLRRAHEELLKRLKEAVDEHRDRLRKILEELERVLKELRKRIEELRRSGDRISEKDVLRKLEEVLRKALEILERLLKKIRESARELLKIIEEVLDANIKVMEEALKTIKELLKDGPDEVKRRLEEKERRIRTRYEELRRRLRKRVKDYEDKLREIEKKVRRDAERIEEELERAKK

SEQ ID NO: 13999 - protein, 250 aa, Artificial Sequence; identical to SEQ ID NO: 13998
  Synthetic

SEQ ID NO: 14000 - protein, 250 aa, Artificial Sequence; identical to SEQ ID NO: 13998
  Synthetic

SEQ ID NO: 14001 - protein, 250 aa, Artificial Sequence; identical to SEQ ID NO: 13998
  Synthetic

SEQ ID NO: 14002 - protein, 247 aa, Artificial Sequence
  Synthetic
SEKEELLKLIKRVIELLKRVLEEHLRLVEDVIRRLKELLDSNEKIVREVIEDLKRLLDEVRGDKEELDRIKEKLEEVLERYKRRLEEIKRDLERMLEDYKRELKRIEEDLRRVLEEVERIATRGEGPAEALIDKLRKILERALRELDKLSKKLDELLKKVLEELEKSNREIDKLLKDVLRRVEEGGASEDLLRKAKKVITEVREKLKRNLEDVRRVIEDVKRKSARILEEARRLIEEVERELEKIRK

SEQ ID NO: 14003 - protein, 247 aa, Artificial Sequence; identical to SEQ ID NO: 14002
  Synthetic

SEQ ID NO: 14004 - protein, 247 aa, Artificial Sequence; identical to SEQ ID NO: 14002
  Synthetic

SEQ ID NO: 14005 - protein, 247 aa, Artificial Sequence; identical to SEQ ID NO: 14002
  Synthetic

SEQ ID NO: 14006 - protein, 236 aa, Artificial Sequence
  Synthetic
SRAERIKRALEEHIRKLKEITDEVRKTNEELLELTRRILEEAKKANEELVKKIREAGDKSKELEEEIRKLIEESERIVEELEERSKELLKRSREEVEEWRRRSEELLRRLEAILRGVKDEKELVERAVKILRDDSRIAKEILRRNLRLIEENLERLKEIIERNLDLLRRLLELLKRAGVDEEALKELEEKLDRYRRKLEDLLRKYAKKLEDYKRKVKKLEEENEELLKRIEKEMEK

SEQ ID NO: 14007 - protein, 236 aa, Artificial Sequence; identical to SEQ ID NO: 14006
  Synthetic

SEQ ID NO: 14008 - protein, 236 aa, Artificial Sequence; identical to SEQ ID NO: 14006
  Synthetic

SEQ ID NO: 14009 - protein, 236 aa, Artificial Sequence; identical to SEQ ID NO: 14006
  Synthetic

SEQ ID NO: 14010 - protein, 238 aa, Artificial Sequence
  Synthetic
SEAEKIREALETNLRLLEELIKRLKEILDTHNELLRRVIETLERLLKELLELLEEGGLDEEVLREVKRLVDELRKEARRVLDEHEKLVRKIKKEAEDVARESEEIIKEVEDKLKGLDREELLERVRRVLKKSDDLIAELVRRALKILEELTRLLAELLKKVVEILRRIVELVERVLTKKGAPKEDLERLRRKVEELEDRLRRLLEKLARDSAELMRELERILDRYARESEELDRRLAE

SEQ ID NO: 14011 - protein, 238 aa, Artificial Sequence; identical to SEQ ID NO: 14010
  Synthetic

SEQ ID NO: 14012 - protein, 238 aa, Artificial Sequence; identical to SEQ ID NO: 14010
  Synthetic

SEQ ID NO: 14013 - protein, 238 aa, Artificial Sequence; identical to SEQ ID NO: 14010
  Synthetic

SEQ ID NO: 14014 - protein, 248 aa, Artificial Sequence
  Synthetic
SAEEELEKLVRKVEEDLKRLEEESERIKKEIKDTLRAIRKRSEDLKRKVKELLRRLEEEGRRVSLEEAIKIIKEILDELAKVNEDIIRIIKELLKRLVDTNRRVIETIDRILKKLVDDLRRGNLPEDKLREVERELRELKKELEEIVRESEKMLKELEDKLREIVRESRELLEKLRRDLKRIKDGNLSADEALEMLKRLLDKALKVHEDVLRKLVELVDEVLKVHEESLRKLLTLAAKVLEVLRKITK

SEQ ID NO: 14015 - protein, 248 aa, Artificial Sequence; identical to SEQ ID NO: 14014
  Synthetic

SEQ ID NO: 14016 - protein, 248 aa, Artificial Sequence; identical to SEQ ID NO: 14014
  Synthetic

SEQ ID NO: 14017 - protein, 248 aa, Artificial Sequence; identical to SEQ ID NO: 14014
  Synthetic

SEQ ID NO: 14018 - protein, 244 aa, Artificial Sequence
  Synthetic
DDERRKLEDLERMVEELKRKSDKLLKEIREEVERLERETRKLLEELKAKVDELREDLRRNPGDRVLEKLVKLLEDILDKVRKLLKENLDLLKRLLDIIEKLLRDNVRLLEELLRIVRELGKSGDEEKLTRKLEKALKEVRDAARETRERLKEAKKEVKTVADRNRARLEELEEEVKRVLDEIRKEGGPSEDLEKAERLVKDILRLNEEHTAELEDVVRDLLRALEKHTRDLEKLVKDALDKVKT

SEQ ID NO: 14019 - protein, 244 aa, Artificial Sequence; identical to SEQ ID NO: 14018
  Synthetic

SEQ ID NO: 14020 - protein, 244 aa, Artificial Sequence; identical to SEQ ID NO: 14018
  Synthetic

SEQ ID NO: 14021 - protein, 244 aa, Artificial Sequence; identical to SEQ ID NO: 14018
  Synthetic

SEQ ID NO: 14022 - protein, 244 aa, Artificial Sequence
  Synthetic
SKIDEALKKLAKILEDAIKLNKELNDTTAEILKEIIKLNAEVLEKIRRILKELVDLILKGLKDDEEAKKELKKVLEEVARRLEEIKKETDRIVKEVEELNERNDREVKRAAEEVRRLLEEIKRSDRDEKELIKALKEIVDRIREAHRRSVEELSEVVKRILDALKDTLRKLEDVVRKLLELARRIAGDTEELRRVVEKVRKELEDDKERYKRLEEEVRRLLEEMKRRSEDLERKVEEILRRLTE

SEQ ID NO: 14023 - protein, 244 aa, Artificial Sequence; identical to SEQ ID NO: 14022
  Synthetic

SEQ ID NO: 14024 - protein, 244 aa, Artificial Sequence; identical to SEQ ID NO: 14022
  Synthetic

SEQ ID NO: 14025 - protein, 244 aa, Artificial Sequence; identical to SEQ ID NO: 14022
  Synthetic

SEQ ID NO: 14026 - protein, 239 aa, Artificial Sequence
  Synthetic
DEEEKIREDLERTLREYERELRRAKEELKETLKRYEEELREVKEDLDRTLEEVDDLLRRGSLSDREAIRILRELLKKLEEIIRRSKEVLDKLIKDLEDISRRSIEVLEELVKKVRKDGLPEEVLRRIKDLIRRLRERNKEILDRIRKLIEELVERNKRALDRLRKLIKELEERVRRTDDKETLARDLKEALKTLIKLIREILEDNLRVLRRIIELIETLLEDNRRVLEEIIKLIEEATT

SEQ ID NO: 14027 - protein, 239 aa, Artificial Sequence; identical to SEQ ID NO: 14026
  Synthetic

SEQ ID NO: 14028 - protein, 239 aa, Artificial Sequence; identical to SEQ ID NO: 14026
  Synthetic

SEQ ID NO: 14029 - protein, 239 aa, Artificial Sequence; identical to SEQ ID NO: 14026
  Synthetic

SEQ ID NO: 14030 - protein, 244 aa, Artificial Sequence
  Synthetic
DELEKVERLLEEIEKIIEDLIRRVEELVRRILEFNKTTLKRNEELVRELEKLVKETTGGTEELKKIVEKLEKLHREVKKKSDDLVKRAEELLKEVKERLKEIVKTIREELRKVKESGGDREELLKLLAEILDKLLKLLKRIIEELLRILKELIKASKESLDDLKRINEELLRDIEDLIRKGIKESKEVVRKLEEDLRRVRERSKKLVREHEKFLEDLEETIKEEKRRVDEELKRIKEEIKETRR

SEQ ID NO: 14031 - protein, 244 aa, Artificial Sequence; identical to SEQ ID NO: 14030
  Synthetic

SEQ ID NO: 14032 - protein, 244 aa, Artificial Sequence; identical to SEQ ID NO: 14030
  Synthetic

SEQ ID NO: 14033 - protein, 244 aa, Artificial Sequence; identical to SEQ ID NO: 14030
  Synthetic

SEQ ID NO: 14034 - protein, 242 aa, Artificial Sequence
  Synthetic
SEKERLMRLLDKLKDLNRRLVERIKELLDKALELHKKLVKELRELLERLKELVERGGVPEELLTRIDELIKKLEDEARKISKEVKRLIDELKKRLEDIHREVDRLIRELKETLKGVTDKDELLRRVAEVLERIARLSEELIREVKEVLEKIVELSRELLKRVLDVLRRIAELLEDALRKGNVSEETVRRLREALKKLEDDLRKIERDAEREYKKLKDELEELTERYRREIRKLKEELKADRK

SEQ ID NO: 14035 - protein, 242 aa, Artificial Sequence; identical to SEQ ID NO: 14034
  Synthetic

SEQ ID NO: 14036 - protein, 242 aa, Artificial Sequence; identical to SEQ ID NO: 14034
  Synthetic

SEQ ID NO: 14037 - protein, 242 aa, Artificial Sequence; identical to SEQ ID NO: 14034
  Synthetic

SEQ ID NO: 14038 - protein, 247 aa, Artificial Sequence
  Synthetic
SEAEDLEELIKELAELLKDVIRKLEKINRRLVKILEDIIRRLKEISKEAEEELRKGTVEDKDILRDLERRLREILEESDRLLEELKRRLEEILRKSKELLRRLEEVLREILKRAEEVKRSNLPKEELIKEIVKLLEELLRVIEKILEDNIRLLEELVEVIKEILEKHLRLLEELVRVIERILREVGKDKDEAERRRRELKDKLDRLREEHEEVKRRLEEELTRLRETHKKIEKELREALKRVRDRST

SEQ ID NO: 14039 - protein, 247 aa, Artificial Sequence; identical to SEQ ID NO: 14038
  Synthetic

SEQ ID NO: 14040 - protein, 247 aa, Artificial Sequence; identical to SEQ ID NO: 14038
  Synthetic

SEQ ID NO: 14041 - protein, 247 aa, Artificial Sequence; identical to SEQ ID NO: 14038
  Synthetic

SEQ ID NO: 14042 - protein, 240 aa, Artificial Sequence
  Synthetic
SDKEEIKRRVEKTARDLETEHDKIKKRLEDTVRDIKRELDELLEKYERVLRKIEKTLREGDGDATDLVDKLLETVKRLNEEVLRTVKKIADELRRLVEEVLRVLRESNETLARLLEEGNVGDEVRERLEEVLRRTEEIIKTLEEIVKRLLDELRRLVEELRRISKKLKDELDKIKEKGKDEKRLIEEVVRLLRENLDVVRRILEALAKLIKELLEALEEVLRRNKELIRELLRVLDEALK

SEQ ID NO: 14043 - protein, 240 aa, Artificial Sequence; identical to SEQ ID NO: 14042
  Synthetic

SEQ ID NO: 14044 - protein, 240 aa, Artificial Sequence; identical to SEQ ID NO: 14042
  Synthetic

SEQ ID NO: 14045 - protein, 240 aa, Artificial Sequence; identical to SEQ ID NO: 14042
  Synthetic

SEQ ID NO: 14046 - protein, 248 aa, Artificial Sequence
  Synthetic
DEEERVKKLLTDLRRLLRKLHEESKKLLDELRKKLRELRRRSEEKLREVERRLREAEKKLPGTRVLKLVADVVKKVLDAIRDLNRKLEEIIDEALKLLEELDDILRRVVEEALRLLKEIKDTKGDREEVKKRVEDILKRLEELVKEYEDRVREIKKRLRRALEELRDEYRKIREDIERVLDELRKGGVPEELLRVLEELVRTLKKLLDENLKMVERLIRELEKVLDDHERKVRRLIEELLEVLDRDAK

SEQ ID NO: 14047 - protein, 248 aa, Artificial Sequence; identical to SEQ ID NO: 14046
  Synthetic

SEQ ID NO: 14048 - protein, 248 aa, Artificial Sequence; identical to SEQ ID NO: 14046
  Synthetic

SEQ ID NO: 14049 - protein, 248 aa, Artificial Sequence; identical to SEQ ID NO: 14046
  Synthetic

SEQ ID NO: 14050 - protein, 248 aa, Artificial Sequence
  Synthetic
DEDRIIEEIARLLEELLRELLELIKKLIETNRRLNEEHERAVRELARLLEELLDRLVKKGISDEKLKRIRERLKRALDDLERLHREINKRLEDLVRELEKLVREILKELKDALEELRRASARAGGEEVLRRLEEIVKKLLDLVRRILERLKEIHKDNVRLLRELNERLTRIVEDLVRLIREILREAGVDEKIAEEIERELEELRRMIKRLHEDLERKLKESEDELREIEARLEEKIRRLEEKLERKRR

SEQ ID NO: 14051 - protein, 248 aa, Artificial Sequence; identical to SEQ ID NO: 14050
  Synthetic

SEQ ID NO: 14052 - protein, 248 aa, Artificial Sequence; identical to SEQ ID NO: 14050
  Synthetic

SEQ ID NO: 14053 - protein, 248 aa, Artificial Sequence; identical to SEQ ID NO: 14050
  Synthetic

SEQ ID NO: 14054 - protein, 251 aa, Artificial Sequence
  Synthetic
DEEEKIRTTLDLLRKLLKVLREILEELIRSNKELNERLLRLVEDSDRLLEELLKKLADDGGVDEEALRRIKKRLEDLIRTNREIEERIDRESERLAEELRRILRELEKELRRLIEDLKEVLKRGLPREELLRRLKKVVEDVLRILEEVLRVVDELDKENVRLLREWLERNKEIVEEVIRILEDLIRKGGSESEEKVRDTEKKLRDLREKHAEIAKELERLLRENRRRLEELAREAKKVLDELRKRLEDERR

SEQ ID NO: 14055 - protein, 251 aa, Artificial Sequence; identical to SEQ ID NO: 14054
  Synthetic

SEQ ID NO: 14056 - protein, 251 aa, Artificial Sequence; identical to SEQ ID NO: 14054
  Synthetic

SEQ ID NO: 14057 - protein, 251 aa, Artificial Sequence; identical to SEQ ID NO: 14054
  Synthetic

SEQ ID NO: 14058 - protein, 242 aa, Artificial Sequence
  Synthetic
SEKEKLLKESEEEVRRLRRTLEELLRKYREVLERLRKELREIEERVRDVVRRLKEVLDRKGLDIDTIIKEVEDLLKTVLDRLRELLDKIRRLTKEAIEVVREIIERIVRHAERVKDELRKEGGDKEKLDRVDRLIKENTRHLKEILDRIEDLVRRSEKKLRDIIREVRRLIEELRKKAEEIKKGPDERLVKTLIEDVEAVIKRILELITRVAEDNERVLERIIRELTDNLERHLKIVREIVK

SEQ ID NO: 14059 - protein, 242 aa, Artificial Sequence; identical to SEQ ID NO: 14058
  Synthetic

SEQ ID NO: 14060 - protein, 242 aa, Artificial Sequence; identical to SEQ ID NO: 14058
  Synthetic

SEQ ID NO: 14061 - protein, 242 aa, Artificial Sequence; identical to SEQ ID NO: 14058
  Synthetic

SEQ ID NO: 14062 - protein, 244 aa, Artificial Sequence
  Synthetic
SELERAEELIKKLLKLHEDVLRRLTEVDDELLEIHDRVLKRLKEVDDELLKLIRDMLRRGNISEDLVREVEERLKTLEKRSRDKKAENEKALRELKKKSEKLRRESRKLLEELRKKVEELRGVDKKDVEKLIKEIVEVHRAMLEKWLRLNEEIAKVHEDSVRDWLKANEEIARTIEEILRRVLRGDEEAKDIREKLERLLRKSEELVRKSLKELKELLDKSKKLLEDSKRRLEEILKEIKDDSR

SEQ ID NO: 14063 - protein, 244 aa, Artificial Sequence; identical to SEQ ID NO: 14062
  Synthetic

SEQ ID NO: 14064 - protein, 244 aa, Artificial Sequence; identical to SEQ ID NO: 14062
  Synthetic

SEQ ID NO: 14065 - protein, 244 aa, Artificial Sequence; identical to SEQ ID NO: 14062
  Synthetic

SEQ ID NO: 14066 - protein, 244 aa, Artificial Sequence
  Synthetic
SLKEIVKEIIDRASELLKRLLERSEDSLRTASELLRKILEDSRRSLRTIARLLEELLRTSGPEEELERAARRVKEELERLHKEIRDVIEEIKKTLAKLNEDLREAIERVKRELERLLKELEDSGVPEELLELVKRVVELMAELLDRLLALNEKILRDIMSILDEILDLNREILRLVKEIIELIRRDGPDREIEKEIRRILEELKAKHDEIEKKIRELEREIKRAHEELEDRIRKIERDLDRRTK

SEQ ID NO: 14067 - protein, 244 aa, Artificial Sequence; identical to SEQ ID NO: 14066
  Synthetic

SEQ ID NO: 14068 - protein, 244 aa, Artificial Sequence; identical to SEQ ID NO: 14066
  Synthetic

SEQ ID NO: 14069 - protein, 244 aa, Artificial Sequence; identical to SEQ ID NO: 14066
  Synthetic

SEQ ID NO: 14070 - protein, 242 aa, Artificial Sequence
  Synthetic
SSEELLKRIVDEDERVLEEWARVLEEIKDLSKAVVDLLDKVLKEIEAIVDEVTRRLERDGTDDKKKIRDLVEEIKDIIRRAREKLRRIVKENEEILEEAKRRLDKIAEDNRRTLEKVRKELEETKSEREVKRILERVLREAEDSHRRAVELLEELLDRSRRTIEEAIRLIKELLDRILELLKRLGLPKDLLETIKKRVEEIRRTLEKIKRDYDKAIEEIRAKLERKLEEYKEVIDDLRRKTK

SEQ ID NO: 14071 - protein, 242 aa, Artificial Sequence; identical to SEQ ID NO: 14070
  Synthetic

SEQ ID NO: 14072 - protein, 242 aa, Artificial Sequence; identical to SEQ ID NO: 14070
  Synthetic

SEQ ID NO: 14073 - protein, 242 aa, Artificial Sequence; identical to SEQ ID NO: 14070
  Synthetic

SEQ ID NO: 14074 - protein, 238 aa, Artificial Sequence; identical to SEQ ID NO: 13234
  Synthetic

SEQ ID NO: 14075 - protein, 238 aa, Artificial Sequence; identical to SEQ ID NO: 13234
  Synthetic

SEQ ID NO: 14076 - protein, 238 aa, Artificial Sequence; identical to SEQ ID NO: 13234
  Synthetic

SEQ ID NO: 14077 - protein, 238 aa, Artificial Sequence; identical to SEQ ID NO: 13234
  Synthetic

SEQ ID NO: 14078 - protein, 231 aa, Artificial Sequence
  Synthetic
DKAEVLREALKLLKDLLEELIKIHEESLKRILDLIDTLVKVHEDALRALKELLERSGLDERELRKVERMATESLRTIAKLKEELRDLARRSLEKLREDLKRVDDTLRKVEEKVRRTGPSEELIEELIRTIEKLLKEIVRINEEVLKAVRELLKTLLKLSEDVVRRIEEILRKGGVPEEIDRELKRVVEELRRLHEEIKERLDDVARRSEEELRRIIKKLKEVVKEIRKKLK

SEQ ID NO: 14079 - protein, 231 aa, Artificial Sequence; identical to SEQ ID NO: 14078
  Synthetic

SEQ ID NO: 14080 - protein, 231 aa, Artificial Sequence; identical to SEQ ID NO: 14078
  Synthetic

SEQ ID NO: 14081 - protein, 231 aa, Artificial Sequence; identical to SEQ ID NO: 14078
  Synthetic

SEQ ID NO: 14082 - protein, 236 aa, Artificial Sequence
  Synthetic
STREKAKKVLDTLRADNEDMKRVVEKILRALKRTNERAEKLAREITEEIKRILKEVGVSEEALKEIEDTLKRVLEEIKRLLDESKKLLEDVEREIREILKTSEELLERIEREIETVGSDEKTLAEILKRLLELNEEMNRRLLKILRDLLRLNEEVIRRLLAVLERLLDALKEALDRGDVPEDLLRKLEEELRRIKEKLRKALEELEREHRELEKELDKLHDESRKEHERIEEELRR

SEQ ID NO: 14083 - protein, 236 aa, Artificial Sequence; identical to SEQ ID NO: 14082
  Synthetic

SEQ ID NO: 14084 - protein, 236 aa, Artificial Sequence; identical to SEQ ID NO: 14082
  Synthetic

SEQ ID NO: 14085 - protein, 236 aa, Artificial Sequence; identical to SEQ ID NO: 14082
  Synthetic

SEQ ID NO: 14086 - protein, 247 aa, Artificial Sequence
  Synthetic
SKAEKLLKDLREALEKVKRRYEELERRLDEVLKEHEEIVKRLLEELEKVLKRIEEGGLPEEELEKLKKLAEKVKELLRELLRLSKELVDRVRELLKRDLDLVRRLVEIALKVLREAREQPNDEKRVEKIKRDLEKKARRVREENERIKRDLKRTADESRKRLEKLLEDLKRELDRLREDLDRGRKDIDERVEELIERLIRIIERLLREVIKSHEKLVRTIERLIEESIRVNEELLEVIERLLDRARK

SEQ ID NO: 14087 - protein, 247 aa, Artificial Sequence; identical to SEQ ID NO: 14086
  Synthetic

SEQ ID NO: 14088 - protein, 247 aa, Artificial Sequence; identical to SEQ ID NO: 14086
  Synthetic

SEQ ID NO: 14089 - protein, 247 aa, Artificial Sequence; identical to SEQ ID NO: 14086
  Synthetic

SEQ ID NO: 14090 - protein, 243 aa, Artificial Sequence
  Synthetic
DLERVVEDIVDKAKRLLDKNLEVLKRIVDEVLRLLERLLRESRKVVKRVKEIIEELVRDEKELRRVKRALEEVLRRHEEIAKELKERLRKVAKEAEEKHKKLVEDLKRVVDEVRKKLSGPLDREKVLEVLDELVTIIAKLLDENIKVLEEVIRVIAELLERLLDSHRRLIDIIAKLLEGLRPGDEDLLTELEKKLRKLKRDSEKVVDDLKKELERIKREVKRLIEENARTLADIKRAVDEARK

SEQ ID NO: 14091 - protein, 243 aa, Artificial Sequence; identical to SEQ ID NO: 14090
  Synthetic

SEQ ID NO: 14092 - protein, 243 aa, Artificial Sequence; identical to SEQ ID NO: 14090
  Synthetic

SEQ ID NO: 14093 - protein, 243 aa, Artificial Sequence; identical to SEQ ID NO: 14090
  Synthetic

SEQ ID NO: 14094 - protein, 239 aa, Artificial Sequence
  Synthetic
SERELIERWLELHKEILRLIRELVERLLKLHREILDTIKKLIRELLELLEDIARKLGLDKEAKDELREIAKRVEDKLEKLERESRKVEEDLKRKLKELTDESDTVEKRVRDVVRRGTQSREEIAEELLRLDRKLLKAVEELLKEILDLNKKLLDDVRAILEETRRVLEKLLDRVRRGERTDDERRTLTELLKRMEDILEKVERTLKKLLDDSARMAEEVKKTLKELLERSEKVAEDVRK

SEQ ID NO: 14095 - protein, 239 aa, Artificial Sequence; identical to SEQ ID NO: 14094
  Synthetic

SEQ ID NO: 14096 - protein, 239 aa, Artificial Sequence; identical to SEQ ID NO: 14094
  Synthetic

SEQ ID NO: 14097 - protein, 239 aa, Artificial Sequence; identical to SEQ ID NO: 14094
  Synthetic

SEQ ID NO: 14098 - protein, 241 aa, Artificial Sequence
  Synthetic
KKEEDLRREVEEVKEEIRELIERSRESVRRILKEIKDLIRKSKESIDKILEDLKRKNLDETLIRAVEKLLRENLELLKKLLETVKELLERNEELLKRLVEEAERILEELLEVARRSGDEKALERVVREVEKELKRLDDELKKALKDSEEELKRLEDELRRAKEENEKTLKKLRDDLRREGRDEEVLRVVEELLKLLKEHLEENVRILRRILELLRRHHDTNRKIVKRILELLRRVLESIRK

SEQ ID NO: 14099 - protein, 241 aa, Artificial Sequence; identical to SEQ ID NO: 14098
  Synthetic

SEQ ID NO: 14100 - protein, 241 aa, Artificial Sequence; identical to SEQ ID NO: 14098
  Synthetic

SEQ ID NO: 14101 - protein, 241 aa, Artificial Sequence; identical to SEQ ID NO: 14098
  Synthetic

SEQ ID NO: 14102 - protein, 241 aa, Artificial Sequence
  Synthetic
SKKELLEEVVRRAIELLKRHLEKLKRILEEIVRLLEEHLEKVERVLEAILSLLDDLLRRGGDERAIRTLEDVKRRLREILERLADENAKAIKRLADLLDKLEKRNKEAIERLEEILEELKRVRRDEELLRVLETLLKIIEDILRENTKVLEDLLRLVEEILEANLRVVEELLRLAREILTEIVGDEDKLKEIEDELRRLLEELRRLDKAIKDRLRELKKDLDEANRRIKETLKKLLREVEK

SEQ ID NO: 14103 - protein, 241 aa, Artificial Sequence; identical to SEQ ID NO: 14102
  Synthetic

SEQ ID NO: 14104 - protein, 241 aa, Artificial Sequence; identical to SEQ ID NO: 14102
  Synthetic

SEQ ID NO: 14105 - protein, 241 aa, Artificial Sequence; identical to SEQ ID NO: 14102
  Synthetic

SEQ ID NO: 14106 - protein, 238 aa, Artificial Sequence
  Synthetic
SDLEELEALIRRLLKINEDLIRIIEDLIRKSLTLLKRIVDLIRELIREIEEIIRRTGIPKELVDEAREKIKRILDEVERLLRELAKAHREILEELRANLERVRRELKKILDRLRDLKRGSGSEEEIRKLIEELLKVHKESLDSIRRLIEKLLRVHETALRRLAELIRRLLEVLKEVLDKGPVSEEIRKRVRDLEEKVKKLLRDLEEESRRVAEKVEEDLKRVEEESRRTAREVEEKER

SEQ ID NO: 14107 - protein, 238 aa, Artificial Sequence; identical to SEQ ID NO: 14106
  Synthetic

SEQ ID NO: 14108 - protein, 238 aa, Artificial Sequence; identical to SEQ ID NO: 14106
  Synthetic

SEQ ID NO: 14109 - protein, 238 aa, Artificial Sequence; identical to SEQ ID NO: 14106
  Synthetic

SEQ ID NO: 14110 - protein, 234 aa, Artificial Sequence
  Synthetic
SERDVLRELLERIKKLLETLIRIVEELVRRSEETIKRLAELNRRLIEEIRRIVEEVKKGVSEEALRDVERLLKELADETEKILREVKKRLDDNLKRLEEIVRDVERLLKELKEEVDRGDKSKEELVREILKVAEEILRKIEELVKHHLDLNRDILRLFTESAEKLEEILREVLRKLGLDEEVKKRVEELRREYRETLKRLRDESEKIAEELKRLLDELRRRLEELARELRERTK

SEQ ID NO: 14111 - protein, 234 aa, Artificial Sequence; identical to SEQ ID NO: 14110
  Synthetic

SEQ ID NO: 14112 - protein, 234 aa, Artificial Sequence; identical to SEQ ID NO: 14110
  Synthetic

SEQ ID NO: 14113 - protein, 234 aa, Artificial Sequence; identical to SEQ ID NO: 14110
  Synthetic

SEQ ID NO: 14114 - protein, 241 aa, Artificial Sequence
  Synthetic
SKEELVKEIDELNKRVNDLLEELLRKSEKLHKEILELLERLLREIISLLRRILEIVERRLEDETLKRVLEKLEETLRRLKKKVDEELKRLEDENRRLKEEMDRLLRKSAEELERLREKVVRDGGSGDEVLARLLELHTEDLKHAREVLDEVLRLNKKALDLIRAILTEVLKLIKELLKLIEAGADEDELRRLLEDIERKIEALLRELKKESEEIRKRIRELLEDNRDKSRKIKKAIEELKK

SEQ ID NO: 14115 - protein, 241 aa, Artificial Sequence; identical to SEQ ID NO: 14114
  Synthetic

SEQ ID NO: 14116 - protein, 241 aa, Artificial Sequence; identical to SEQ ID NO: 14114
  Synthetic

SEQ ID NO: 14117 - protein, 241 aa, Artificial Sequence; identical to SEQ ID NO: 14114
  Synthetic

SEQ ID NO: 14118 - protein, 246 aa, Artificial Sequence
  Synthetic
KEIEETLKELEDLNREMVETNRRVLEETRRLNKETVDRVKATLDELAKMLKKLVDDVRKGPTSEELKRLLAELEELLARVVRRVEELLKKSTDLLERAVKDSADALRRSHEVLKEVASRVKRAKDEGLPREEVLRLLRELLERHAKVLKDIVRVSEKLLREHLKVLREIVEVLEELLERILKVILDTTGGDKAVEELEKALEEIKRRLKEVIDRYEDELRKLRKEYKEKIDKYERKLEEIERRERT

SEQ ID NO: 14119 - protein, 246 aa, Artificial Sequence; identical to SEQ ID NO: 14118
  Synthetic

SEQ ID NO: 14120 - protein, 246 aa, Artificial Sequence; identical to SEQ ID NO: 14118
  Synthetic

SEQ ID NO: 14121 - protein, 246 aa, Artificial Sequence; identical to SEQ ID NO: 14118
  Synthetic

SEQ ID NO: 14122 - protein, 231 aa, Artificial Sequence
  Synthetic
SKEEEVEKVLRKWEEILRRLIEENKRANDKIRREYEELVKEIRRVLEEIKEVAERLGVSEEVKRILEKLIKLLEDILEYEKENVERLIELNERILRELKKSVEELKALVTRVRRDGLPESEVRKLVEDVLRKNEELLKEAKKAWRDSIENLKRVLEEVAKLVKTVLREIEEKIDDEDVVRALIEVIERLLRVAEEVIRRILKVNTELMRVDERSIRESLKAISEVLKVLDT

SEQ ID NO: 14123 - protein, 231 aa, Artificial Sequence; identical to SEQ ID NO: 14122
  Synthetic

SEQ ID NO: 14124 - protein, 231 aa, Artificial Sequence; identical to SEQ ID NO: 14122
  Synthetic

SEQ ID NO: 14125 - protein, 231 aa, Artificial Sequence; identical to SEQ ID NO: 14122
  Synthetic

SEQ ID NO: 14126 - protein, 245 aa, Artificial Sequence
  Synthetic
DEDELIRKLLEDLKDIVRKILELIERDLRDIERVVRRIVKVIRDDLKKIKEVVDDIARGVPRTEELERVIKRIEELLRTSEEELDRILKEIEELLRESRRRLEEVVSAVEELLRRVEEIVDKGRESKEDVIKLLREVVDDILRLVEEVVRTNLEIIKRILELIERVIRLNLSIIRDILRLLEGTVDSELADRIRKLIEDLERHTAKVLEDVKRAITELRKNSKDILEEVRKLIDELRKRIKEVED

SEQ ID NO: 14127 - protein, 245 aa, Artificial Sequence; identical to SEQ ID NO: 14126
  Synthetic

SEQ ID NO: 14128 - protein, 245 aa, Artificial Sequence; identical to SEQ ID NO: 14126
  Synthetic

SEQ ID NO: 14129 - protein, 245 aa, Artificial Sequence; identical to SEQ ID NO: 14126
  Synthetic

SEQ ID NO: 14130 - protein, 247 aa, Artificial Sequence
  Synthetic
RDRDVLRKVKAEIEELVARIEKVSRDALSEVKRLLDENRKIAEDVLRLIESLLRKIRDTRGDDEVVKETEEVLRDNHRLLEELIRRLIKVLEEWLRRHKKLLDEIRELLKEILRLVKESGVSEDLLRRLKRVIEELDKKLKESEEKLRRVVEKAKEDLKAVLEEHRKVLEDLKRALEEVREKLRERGSEEVVEELLRMLKRVAEEMKRVHDDLSRAVEKVVRDVVRVDKELLDELARILRRLEEVIT

SEQ ID NO: 14131 - protein, 247 aa, Artificial Sequence; identical to SEQ ID NO: 14130
  Synthetic

SEQ ID NO: 14132 - protein, 247 aa, Artificial Sequence; identical to SEQ ID NO: 14130
  Synthetic

SEQ ID NO: 14133 - protein, 247 aa, Artificial Sequence; identical to SEQ ID NO: 14130
  Synthetic

SEQ ID NO: 14134 - protein, 231 aa, Artificial Sequence
  Synthetic
SKDEELARLLEELVERWRKIVEDLERDHRRLVKEIRELVERIRKKLEELVDRIRKNGIDERIVRLIEEIAKIIEEVLKEIVKLVERAVRENVRVLRESVRLVAELVETLARLLRGSDERVTEAIKKVLDTSEDLIRRVIKVNEDILREIAKLVEEVLREAERILTEIKKEGDREEIRRILEELKRIVDDVLRIIARILKLLRDLTRRLAEVAKAVHKLLEELLRKLKEDTR

SEQ ID NO: 14135 - protein, 231 aa, Artificial Sequence; identical to SEQ ID NO: 14134
  Synthetic

SEQ ID NO: 14136 - protein, 231 aa, Artificial Sequence; identical to SEQ ID NO: 14134
  Synthetic

SEQ ID NO: 14137 - protein, 231 aa, Artificial Sequence; identical to SEQ ID NO: 14134
  Synthetic

SEQ ID NO: 14138 - protein, 235 aa, Artificial Sequence
  Synthetic
SAAETVKRLAEESSERIRKIVEDDKRVADDSSRKIKELIEEIKRRVKELLDRIKGLGSTEDLEKLLDELLKEVKRLLEELLDAHAKWSDDSRRLLEAVLRTHKELIDRLIKLLRDGGKPEEAVRRLEKVLRESLRRVKEVIKELIDLNKETLDRLKKIVEDLERVLREVLTELRRGSDSKEAVIRLIEELVKLLEDVLRRLLEVNETLVELNKRVWDRLVRINEELAEVALRVAT

SEQ ID NO: 14139 - protein, 235 aa, Artificial Sequence; identical to SEQ ID NO: 14138
  Synthetic

SEQ ID NO: 14140 - protein, 235 aa, Artificial Sequence; identical to SEQ ID NO: 14138
  Synthetic

SEQ ID NO: 14141 - protein, 235 aa, Artificial Sequence; identical to SEQ ID NO: 14138
  Synthetic

SEQ ID NO: 14142 - protein, 235 aa, Artificial Sequence
  Synthetic
SALETVKKLLEDSSEKIERIVEEDERVAKESSDRIRRLVEEDKRVADEILDLIEKIGDTDTLLKLVEEWSRTSKKLLDDVLKLHKDWSDDSRRLLEEILRVHEELIRRVKEILDREGKPEEVVRELEKVLKESLDTLEEIIRRLDEANAATVKRVADVIRELEDINRKVLEEIKRGSDDAEAVIKVIEKLIRANKRVWDALLKINEDLVRVNKTVWKELLRVNEKLARDLERVVK

SEQ ID NO: 14143 - protein, 235 aa, Artificial Sequence; identical to SEQ ID NO: 14142
  Synthetic

SEQ ID NO: 14144 - protein, 235 aa, Artificial Sequence; identical to SEQ ID NO: 14142
  Synthetic

SEQ ID NO: 14145 - protein, 235 aa, Artificial Sequence; identical to SEQ ID NO: 14142
  Synthetic

SEQ ID NO: 14146 - protein, 242 aa, Artificial Sequence
  Synthetic
DEIETVLKRLAELIKESLDLLRETLDELRKIIEESKKSLEDVLRRLKELIDRLRRLAKEGGSEELLRLLIEVIERLLKVVEDLLRESNRVVERLIRVNREALRLSNRVVADLLKVLKDAGPDSEELRKLAEDVLRENAELSRESVKIAEKMLEENRDLTRRLKELAKKVLEEIRDLVRGVRDADELLRRVEEILKRLLELIRRIIEEHRKILERLLETHEDLIRKHEEILRRLLKAADEERQ

SEQ ID NO: 14147 - protein, 242 aa, Artificial Sequence; identical to SEQ ID NO: 14146
  Synthetic

SEQ ID NO: 14148 - protein, 242 aa, Artificial Sequence; identical to SEQ ID NO: 14146
  Synthetic

SEQ ID NO: 14149 - protein, 242 aa, Artificial Sequence; identical to SEQ ID NO: 14146
  Synthetic

SEQ ID NO: 14150 - protein, 233 aa, Artificial Sequence
  Synthetic
SKEEKLKDDVRAVLEDLDRVLKELEKLSEDNLRELKRVLDRITDLHRRILDELRKGIGSEELLRRVEKVLKDNLDLLRKLVEEHKESSERDLKRVEDLVREIKEVLRKLLELEDRGTDIRKIEEEIERLLRKIRKAVEESKDLNRRNSERIEEVARRSEELARRLLKEIRERGDSKAAEDILRVLEKLVKVSREAIKLILELSEHHVRVSTRIARLLLDVARKLAEVIKEAER

SEQ ID NO: 14151 - protein, 233 aa, Artificial Sequence; identical to SEQ ID NO: 14150
  Synthetic

SEQ ID NO: 14152 - protein, 233 aa, Artificial Sequence; identical to SEQ ID NO: 14150
  Synthetic

SEQ ID NO: 14153 - protein, 233 aa, Artificial Sequence; identical to SEQ ID NO: 14150
  Synthetic

SEQ ID NO: 14154 - protein, 238 aa, Artificial Sequence
  Synthetic
SEIEDVIRRLRKILEDLERVSEKLLREIKKILDEARRLNEEVIKEIKRVLEDAVRVFRDGSGSKEELAKLVEELIRELAKLAKEVDEIHKRIVERLKALVEDAERIHRKIVETLEEIVRGVPSEELKRVVEAIVEVIKEHLKVLADVIRRIIKAIEENAETIKRVLEDIVRVLELVLRGEGSIEDLVREVERLIKRIEDSLRELEKTVRELLKRIKEASDKVREDVDRLIKELKEAAD

SEQ ID NO: 14155 - protein, 238 aa, Artificial Sequence; identical to SEQ ID NO: 14154
  Synthetic

SEQ ID NO: 14156 - protein, 238 aa, Artificial Sequence; identical to SEQ ID NO: 14154
  Synthetic

SEQ ID NO: 14157 - protein, 238 aa, Artificial Sequence; identical to SEQ ID NO: 14154
  Synthetic

SEQ ID NO: 14158 - protein, 246 aa, Artificial Sequence
  Synthetic
SREEIVATLEDLARKILEVVKKLAKEIEDAWREIERAVREILKRLEELWREIEDVVRKKVDSRVAEILETVVKRVVDITRRLIEEAERVVRELVDITRKLITILEEVVRRLVEIVREASKIDDRRELEDMLRKIREVVREVIERLKKLDEDVRRVVEEVIRRLEELNKRLEDVIREVKKRLKELGLSEEAVKELVELLEEILERNTRVIKEIIDLLRTVIRIHEKIVEDLIKLLEELLRRLEEATR

SEQ ID NO: 14159 - protein, 246 aa, Artificial Sequence; identical to SEQ ID NO: 14158
  Synthetic

SEQ ID NO: 14160 - protein, 246 aa, Artificial Sequence; identical to SEQ ID NO: 14158
  Synthetic

SEQ ID NO: 14161 - protein, 246 aa, Artificial Sequence; identical to SEQ ID NO: 14158
  Synthetic

SEQ ID NO: 14162 - protein, 237 aa, Artificial Sequence
  Synthetic
KEKEDALKKLEDLARKSREDLERVLRKHKKILDKIEELLKRVLDEHKKIVDDILRKTGTESEILKELARLLREHHEALRRLIEELRRLLEEHHKILEDLAREHKRLLDELIKVVADGVDKDELERIIKELRERDKKLVDDLRKVSEDLLDAVRKLVEDLERISRELLRRVEELAKGIDEELAREVERVIKELLDKSKEILERIERAIDELLKVSEEILKLSEDASEELLKILREFAK

SEQ ID NO: 14163 - protein, 237 aa, Artificial Sequence; identical to SEQ ID NO: 14162
  Synthetic

SEQ ID NO: 14164 - protein, 237 aa, Artificial Sequence; identical to SEQ ID NO: 14162
  Synthetic

SEQ ID NO: 14165 - protein, 237 aa, Artificial Sequence; identical to SEQ ID NO: 14162
  Synthetic

SEQ ID NO: 14166 - protein, 229 aa, Artificial Sequence
  Synthetic
SKEERLREVAEKHKKDLEDIVKRVDEAAKETARRLEEILKRLEEVLKKILDDLEKGPDDEKLKKVKKILKDIMDRLAELIKKILKLLKENLEKIKELLRRNLEISEELLKLAKGLSDRDVLETVRRVLEKLDEEWDRVLEDSRRIIETILRELDTLLREVEKLIKEIKDEISGSKEVLDILERAVEVVRRVIKALKEVLERHVDATREVIERVKRVNKRLLEAVREVVT

SEQ ID NO: 14167 - protein, 229 aa, Artificial Sequence; identical to SEQ ID NO: 14166
  Synthetic

SEQ ID NO: 14168 - protein, 229 aa, Artificial Sequence; identical to SEQ ID NO: 14166
  Synthetic

SEQ ID NO: 14169 - protein, 229 aa, Artificial Sequence; identical to SEQ ID NO: 14166
  Synthetic

SEQ ID NO: 14170 - protein, 241 aa, Artificial Sequence
  Synthetic
SEKELLKEILDRIRELLEDDNRLLKRIVDEIRKLLEEWLRVHKEILERIKELLDRIGAPEDVIRELTRALKETEEDVDRVIRTLEKLLKEVLDAHEEVVRKLDRLLKEVERLVEGGDAEEVVRDLLRVVKEILDESKAVIDELARVVDEILKLLEEVDRKLAKVVKEILEDVLRGSGDDEDAVRKIAKIIEELKRLLEDLARDTRRVIEEAKRLLKEWRDRNKEVADTLKKLLEDLIRKIR

SEQ ID NO: 14171 - protein, 241 aa, Artificial Sequence; identical to SEQ ID NO: 14170
  Synthetic

SEQ ID NO: 14172 - protein, 241 aa, Artificial Sequence; identical to SEQ ID NO: 14170
  Synthetic

SEQ ID NO: 14173 - protein, 241 aa, Artificial Sequence; identical to SEQ ID NO: 14170
  Synthetic

SEQ ID NO: 14174 - protein, 248 aa, Artificial Sequence
  Synthetic
SEDELLEKIVRKLAEAVKRIEEELRKSKREIERLVKEIKEKLEDSLARVKETLDRIRETRKGPSDEEVLERLVRTLEELLARHLKLIEDIARELKKLLKEHLDRIETIVRDLKRLLKEILDELERTGLPREALEAVRELVKTVARLLDEVLKNNKKLLDDLKKELDDVLANNKRIVDELARLLERVRRGKEDLEELLRLLKEVIERSIESLERLLELILRVLEYSVASLEELLRRLLEVIKRIVDTTK

SEQ ID NO: 14175 - protein, 248 aa, Artificial Sequence; identical to SEQ ID NO: 14174
  Synthetic

SEQ ID NO: 14176 - protein, 248 aa, Artificial Sequence; identical to SEQ ID NO: 14174
  Synthetic

SEQ ID NO: 14177 - protein, 248 aa, Artificial Sequence; identical to SEQ ID NO: 14174
  Synthetic

SEQ ID NO: 14178 - protein, 237 aa, Artificial Sequence
  Synthetic
DEDEIAEELKRLLREVEEASKEIVRRMRELAREANKASEDILRTLEKLLEELRRRVEESGGSSKAVLDKIREVLETLKELLDRHHETVRDLVRRLKELLDRHNETVAKLVEDIKALLDKSGGREEIKKRLEDALREHNRIIAEIKKLLDKVLKDHKDILDDIKKKLDDVLREVTEILKRGRIDEVVRRIERVIREVIKILARANKRLHDVVEEIIRLLEEVTDELRRVVEEVIRRTK

SEQ ID NO: 14179 - protein, 237 aa, Artificial Sequence; identical to SEQ ID NO: 14178
  Synthetic

SEQ ID NO: 14180 - protein, 237 aa, Artificial Sequence; identical to SEQ ID NO: 14178
  Synthetic

SEQ ID NO: 14181 - protein, 237 aa, Artificial Sequence; identical to SEQ ID NO: 14178
  Synthetic

SEQ ID NO: 14182 - protein, 246 aa, Artificial Sequence
  Synthetic
DAEEKAKKIEDVARRYAEEVKRVLDDLERLLRESEEEVERIVRKLEKLARDLEERVREGTKSEAVERLVRELLKAIKELIDVLRDVVRLSAEVIKELLDVLRELVELNLRAIKEIIEVLSKGKSEEVKKALDEILEKIEKVNTDVNRRLAEIIRKLREIHEEVLRELDKILRDIESVVRDVERGIDDKEVIDALKELLKVLEDLLREIKEALTRNLEKIDELLKLLHELSRRVIEELRKLLEDLKR

SEQ ID NO: 14183 - protein, 246 aa, Artificial Sequence; identical to SEQ ID NO: 14182
  Synthetic

SEQ ID NO: 14184 - protein, 246 aa, Artificial Sequence; identical to SEQ ID NO: 14182
  Synthetic

SEQ ID NO: 14185 - protein, 246 aa, Artificial Sequence; identical to SEQ ID NO: 14182
  Synthetic

SEQ ID NO: 14186 - protein, 240 aa, Artificial Sequence
  Synthetic
DEEELLREIKTILDESLKALEELIRKIMRILDKSLKDLEEIVREIKKTIDELLEKVRRSGLPEEVLKKVASVAEKVKEDIDRLLEDVERSHREVKKKLDELLKEVKRSHEEVKKELDSLRGDSDRDTVAREILRVLKKNLDVLAEVVEKIVKVLEDNLKSLKAVLETLVDLLRKLIKVLREGGLSEEALDDLRRLVKELADKLRKLLKDYKDLLKELKDEAKKLLDDYARLIEELEKKAR

SEQ ID NO: 14187 - protein, 240 aa, Artificial Sequence; identical to SEQ ID NO: 14186
  Synthetic

SEQ ID NO: 14188 - protein, 240 aa, Artificial Sequence; identical to SEQ ID NO: 14186
  Synthetic

SEQ ID NO: 14189 - protein, 240 aa, Artificial Sequence; identical to SEQ ID NO: 14186
  Synthetic

SEQ ID NO: 14190 - protein, 237 aa, Artificial Sequence
  Synthetic
SREELLDRILEAIAKILEDLKRLIDENLARLEEVVRELERIIDRNLKLIREILDELKKGSGSEEILEKIKKVDKELEDLIRRLLKKLEDLIRETERRLREILKRIRDLLKEVKDRDKDLERLLEVLEEVLRVIAELAKELLDSLRKVLKVVEEVLRLLNEVNKEVLDVIRELAKDGGSDEIIRKLDELLKEVEKVHKEVKDRIRKLLEDHKRSLDEVKKKLERLLERAKEVVEREKK

SEQ ID NO: 14191 - protein, 237 aa, Artificial Sequence; identical to SEQ ID NO: 14190
  Synthetic

SEQ ID NO: 14192 - protein, 237 aa, Artificial Sequence; identical to SEQ ID NO: 14190
  Synthetic

SEQ ID NO: 14193 - protein, 237 aa, Artificial Sequence; identical to SEQ ID NO: 14190
  Synthetic

SEQ ID NO: 14194 - protein, 246 aa, Artificial Sequence
  Synthetic
SEREELLERIKEILKRVKDKLDEDLKRLKEILEKLKEKADRDLEELRRRIEEVREKLERTGRTDELVKEVLDTVRRNLENLKRLVEDILRKLEENVKNLTDLVREILKLITELIKRLEDGGLPKEVLDALRRVLEKLEELLREILERLKRSLEAVKRKIEELLKELERSLDELRRALERIRKEIGDSETAVRAIIRVLEKHLEAVRRVLEELLKVLAEHLETVRELIERLKRVLEEAIEVVERVAR

SEQ ID NO: 14195 - protein, 246 aa, Artificial Sequence; identical to SEQ ID NO: 14194
  Synthetic

SEQ ID NO: 14196 - protein, 246 aa, Artificial Sequence; identical to SEQ ID NO: 14194
  Synthetic

SEQ ID NO: 14197 - protein, 246 aa, Artificial Sequence; identical to SEQ ID NO: 14194
  Synthetic

SEQ ID NO: 14198 - protein, 240 aa, Artificial Sequence
  Synthetic
DREKSVRDIEEDLKRVLDKLRRRVETSKEELKKVLKADKENADELEKTLRDVVRELDRGIDSEVLRAVREIVKRLVEVVRRYNELSEKIIRDLVRVNDRVLELLKRIVKRLIDVVRELEKIGDKEKALRRLEEVVKEVKRRIEELLKELEDVHRELVKILEEVNEDLKRVATEVKEIIKTGIKSSEVAKELDEVIKRLLDNLKENTDRLKEVIDRNLADLRDLAEELRAVIERLLEDARR

SEQ ID NO: 14199 - protein, 240 aa, Artificial Sequence; identical to SEQ ID NO: 14198
  Synthetic

SEQ ID NO: 14200 - protein, 240 aa, Artificial Sequence; identical to SEQ ID NO: 14198
  Synthetic

SEQ ID NO: 14201 - protein, 240 aa, Artificial Sequence; identical to SEQ ID NO: 14198
  Synthetic

SEQ ID NO: 14202 - protein, 252 aa, Artificial Sequence
  Synthetic
SLEEITKRLLELVEENLARHEEILRELLELAKRLAKEDRDILEEVLKLIEELLKLLEDNGSSEEDLKRLLKEVIEELRAVVKRVKDKWDEVVKRIEDLVKKLKELHDDTLRKLRELVRKIVTDISESGGEAEKVKRVVEKILELVERLAKVVKESVEKLLEILRELAEVSKRVAEALLRLLEELVRVIRIKDERTLREVVRKVLEEAKRLLDELEEVHKRVKKELEDIIEENRRVVKRVRDELREIKRELDE

SEQ ID NO: 14203 - protein, 252 aa, Artificial Sequence; identical to SEQ ID NO: 14202
  Synthetic

SEQ ID NO: 14204 - protein, 252 aa, Artificial Sequence; identical to SEQ ID NO: 14202
  Synthetic

SEQ ID NO: 14205 - protein, 252 aa, Artificial Sequence; identical to SEQ ID NO: 14202
  Synthetic

SEQ ID NO: 14206 - protein, 241 aa, Artificial Sequence
  Synthetic
SAEEAVEKLVRIARAIVKINEDLSREVVRILREIVRLNEETTRLLVEIAREVVKVVEDGGLSEDVVRKLRKLVKELEDLLKKSNDDIRKLVEDVARRLKESNDEIRRLVERLEELLKRGPGDEELLRLVEELTEELLRTHEEVVKALEKLTADLLELHRELLERVRRLTKRIEEELKRVGVSEELLRRLEELRKRLEKVLDDSAKELEKLKRELERLLEESRRKLEKLKRDLERVLEETRR

SEQ ID NO: 14207 - protein, 241 aa, Artificial Sequence; identical to SEQ ID NO: 14206
  Synthetic

SEQ ID NO: 14208 - protein, 241 aa, Artificial Sequence; identical to SEQ ID NO: 14206
  Synthetic

SEQ ID NO: 14209 - protein, 241 aa, Artificial Sequence; identical to SEQ ID NO: 14206
  Synthetic

SEQ ID NO: 14210 - protein, 237 aa, Artificial Sequence
  Synthetic
REDEVLRDIERLLREIEEKIRRILEESTAELRKVEEEVKRIIERTKRELKAIKEDVERKGIDEELRKLLDEVLDKLTKLIERNKRSLERILELIKRIIDENLEVLRDIIRLLEELLKATKDNGVPKDEVIKLVEDVVRRIEELVTRVVARNEKLVKDLDDLAKKNVRENEELLREIDRGLDEDLLEKIKRVIREHIKALEKLARDLKEILRRHIEALKELARDLAEVIRKLLEDVKR

SEQ ID NO: 14211 - protein, 237 aa, Artificial Sequence; identical to SEQ ID NO: 14210
  Synthetic

SEQ ID NO: 14212 - protein, 237 aa, Artificial Sequence; identical to SEQ ID NO: 14210
  Synthetic

SEQ ID NO: 14213 - protein, 237 aa, Artificial Sequence; identical to SEQ ID NO: 14210
  Synthetic

SEQ ID NO: 14214 - protein, 237 aa, Artificial Sequence
  Synthetic
SREDLLRSLAELIETILRKSSELLDRLLKLVREHSETSERLIRELKKILEDILKLIKGGISEDDVRRIVKEAKDELRRSVEEVKKSVDDLKEELKRSLREVRELVKSIADALEEIVRRSSGLGEVIKKLLELLRRLLEVHERTIRLLAELLERHLEVHEESIRLLLRLLEELLELVERKGDEKELRRIAEAVERVLRDHKAKNDKILRDVEEVLRRHLEELARILKDVKKVLDEARK

SEQ ID NO: 14215 - protein, 237 aa, Artificial Sequence; identical to SEQ ID NO: 14214
  Synthetic

SEQ ID NO: 14216 - protein, 237 aa, Artificial Sequence; identical to SEQ ID NO: 14214
  Synthetic

SEQ ID NO: 14217 - protein, 237 aa, Artificial Sequence; identical to SEQ ID NO: 14214
  Synthetic

SEQ ID NO: 14218 - protein, 239 aa, Artificial Sequence
  Synthetic
SEEDEVLKTLDRKHKEAKKELDKVLRELEEEHKKVKRELDEVLKRLEDIHRRITELLRRGGISLEDVLRMVKEANRELVEVIKRIVKTVEDLNARAVEVVKRLAEELERLNAEMVKVLRKSGRSEEIEKDLRRSSADIRRLVEEIERRLRDSLRKLRKLADDLAKKLKESLDKLEELVRRGVDEEAVERVLKENKELIEEIVRLIRKILDENIELIRRIVRLLERLLRENLRLIEEARK

SEQ ID NO: 14219 - protein, 239 aa, Artificial Sequence; identical to SEQ ID NO: 14218
  Synthetic

SEQ ID NO: 14220 - protein, 239 aa, Artificial Sequence; identical to SEQ ID NO: 14218
  Synthetic

SEQ ID NO: 14221 - protein, 239 aa, Artificial Sequence; identical to SEQ ID NO: 14218
  Synthetic

SEQ ID NO: 14222 - protein, 248 aa, Artificial Sequence
  Synthetic
SKEEDVRRLIEELVRELRRILEENRRMLKELVEKLEEVLRRSEEVWRRLAKELDELLKEGNSDAVREAVETIRRVLEDLVELDRRVVKVIKEVLERHAKSSTELVRELEDVLRAAVEAIEKGKSEEDLKRELRKLKERLKSVLKRHDDTNKELFRELEDVLRKHEEELRRLADELRRLLEDLKRSGDIPEEVIKKIEDLVRKTERELREVHKELRRLVEEAKEVVDRSVEILRDLVRKIVRILEESAR

SEQ ID NO: 14223 - protein, 248 aa, Artificial Sequence; identical to SEQ ID NO: 14222
  Synthetic

SEQ ID NO: 14224 - protein, 248 aa, Artificial Sequence; identical to SEQ ID NO: 14222
  Synthetic

SEQ ID NO: 14225 - protein, 248 aa, Artificial Sequence; identical to SEQ ID NO: 14222
  Synthetic

SEQ ID NO: 14226 - protein, 233 aa, Artificial Sequence
  Synthetic
SEKEAIKEVAELLKALIDDLLRLLKEDVDTARRVLDEIKKLLEENESIAREVLRRLREGKGAERAEELVREWIERTREILKRIEELLRRWTRKTREILKRIEELVRRVIEVVRRGGVPKELVDKLEEVLRKLLKLVEDHVRKVEKIISELLKLIKEHVEKVERIARKLLELLRRGGDETDLDRIVKEMEKVLEDSIRELEKLVKRLEDILRESEKALRDLLSELAKVLEEVRT

SEQ ID NO: 14227 - protein, 233 aa, Artificial Sequence; identical to SEQ ID NO: 14226
  Synthetic

SEQ ID NO: 14228 - protein, 233 aa, Artificial Sequence; identical to SEQ ID NO: 14226
  Synthetic

SEQ ID NO: 14229 - protein, 233 aa, Artificial Sequence; identical to SEQ ID NO: 14226
  Synthetic

SEQ ID NO: 14230 - protein, 237 aa, Artificial Sequence
  Synthetic
SREELLKELRKLVEEIKRRSEELLRRLEKLLEDNERRTRELLERLKELLREIEERIRGGGPSEEVIRLLEELVRAIERVLEEHLESNRRLVEAAESVLREHVELVKSLVRAIEDVVEKGLSEDKIRTIKKLLDEWARRLEKLVRDVRRKLEEWIKRTEEMIDEVARLLEELKETIRRKGGDEDTVRELTELVRRLLKRVEELLKRSLEILRELIKAIADAIKESLDILDRLLREVAR

SEQ ID NO: 14231 - protein, 237 aa, Artificial Sequence; identical to SEQ ID NO: 14230
  Synthetic

SEQ ID NO: 14232 - protein, 237 aa, Artificial Sequence; identical to SEQ ID NO: 14230
  Synthetic

SEQ ID NO: 14233 - protein, 237 aa, Artificial Sequence; identical to SEQ ID NO: 14230
  Synthetic

SEQ ID NO: 14234 - protein, 243 aa, Artificial Sequence
  Synthetic
SEAERLADEVRKAVKKSEEDNETLVREVEKAVRELKKNNKTWVDEVRKLMKRLVDLLRDGQVSDRDLLKELEEVLRRVLEALAENHERTEEILKRWLDRYAEDIERLRKVLKEVIEALKRGGSDDKRIVDELEEILRRNEDVLDKIAKRLRRLLEEDRRLLERIVRELKRLLDDLDRITKEGKSEELVRIAIEVLKRLLEIIEELVRLNNEILERLLKIVRELHKDNIKILEDLLRIIEEVLR

SEQ ID NO: 14235 - protein, 243 aa, Artificial Sequence; identical to SEQ ID NO: 14234
  Synthetic

SEQ ID NO: 14236 - protein, 243 aa, Artificial Sequence; identical to SEQ ID NO: 14234
  Synthetic

SEQ ID NO: 14237 - protein, 243 aa, Artificial Sequence; identical to SEQ ID NO: 14234
  Synthetic

SEQ ID NO: 14238 - protein, 245 aa, Artificial Sequence
  Synthetic
SEKDEVTRRIRELLKEAEETNREAIERIKRLLDRVREAVEEVAKRSEELLRRLKKVLDRGLQDDEALLKLLIDALREHNRLSTELIKILIDVLRTILKIIKDVLATNIEIARRILDLVRRLAERGGLDDRLVKEVEKLVRTAERLHRDALRKVKRLVEELEKRLRELVKTDHDLVRRLETLLRRGSGSKEDLLREIARILAESLRLIRELLKEIEKIVKEIIELLERLNDELRKIIEAILETTKK

SEQ ID NO: 14239 - protein, 245 aa, Artificial Sequence; identical to SEQ ID NO: 14238
  Synthetic

SEQ ID NO: 14240 - protein, 245 aa, Artificial Sequence; identical to SEQ ID NO: 14238
  Synthetic

SEQ ID NO: 14241 - protein, 245 aa, Artificial Sequence; identical to SEQ ID NO: 14238
  Synthetic

SEQ ID NO: 14242 - protein, 239 aa, Artificial Sequence
  Synthetic
SAEDLVRRVKDLVDKLEDKLRKVVRTNERLWEEIRKRLEELVRRNKELWDALVEKLKAGDKDKDELIEEAKSLEDESNALVEKLVRDIERVLAESNKLLDTLAKEIEEVLEEIVELVERGSGSDKEAREKLEDIKARLKEVLKKLREESKRIIDELRRLLEEYKRLVKEIRDRIEEVRKRNSEIRVLVELVRRHNKVLKELVEELEKLVRDHNRVVEEVVRELVELLSRAVEVIKEVVK

SEQ ID NO: 14243 - protein, 239 aa, Artificial Sequence; identical to SEQ ID NO: 14242
  Synthetic

SEQ ID NO: 14244 - protein, 239 aa, Artificial Sequence; identical to SEQ ID NO: 14242
  Synthetic

SEQ ID NO: 14245 - protein, 239 aa, Artificial Sequence; identical to SEQ ID NO: 14242
  Synthetic

SEQ ID NO: 14246 - protein, 232 aa, Artificial Sequence
  Synthetic
SEKELVDDIRRILEEILRLLRSLLEEVIRLLEENEKLVRRHLKTVIDILRRVAKLLDENGIRTDEADRVLERLEKAHRELLEDYKRALEKIKETLERVLREAEEVVKKIDDALRKLGGSKEVLKRLLEELLRLVEKIAEEIKRLLSELVRVTEELVRTNKELLEEAVRVIRKEVGDDSLVREVEELIKRLEKHIDDLLKTSRDLVKRVLDLVDEVVKRVEDLVERVKEKIDT

SEQ ID NO: 14247 - protein, 232 aa, Artificial Sequence; identical to SEQ ID NO: 14246
  Synthetic

SEQ ID NO: 14248 - protein, 232 aa, Artificial Sequence; identical to SEQ ID NO: 14246
  Synthetic

SEQ ID NO: 14249 - protein, 232 aa, Artificial Sequence; identical to SEQ ID NO: 14246
  Synthetic

SEQ ID NO: 14250 - protein, 247 aa, Artificial Sequence
  Synthetic
DEERLAEELERVLDRNRKLLEEALRELRRVIEENRKSVKRLLDELKRVLDELLKVLRELSRGDSDEELRKVIEDLIRKLTKVLDKVRSLVEENIERLARVLEKLERLARENLEDLKKVLDDVDKKLKDRRLVERLAELVRELIEVNKEILEMLKEIVRELLEINRTLLERLKDLVATALEIIKLLARGDGTEEDVERAVKEIRDRLRKLLEDYERAVRRLEDKLRRVRERYEAVLKRIKDKLEETKR

SEQ ID NO: 14251 - protein, 247 aa, Artificial Sequence; identical to SEQ ID NO: 14250
  Synthetic

SEQ ID NO: 14252 - protein, 247 aa, Artificial Sequence; identical to SEQ ID NO: 14250
  Synthetic

SEQ ID NO: 14253 - protein, 247 aa, Artificial Sequence; identical to SEQ ID NO: 14250
  Synthetic

SEQ ID NO: 14254 - protein, 243 aa, Artificial Sequence
  Synthetic
SRVEELKKLIEDILRISREVVERIARVAEDIHRINRRVLDDLRKLIEDILRTVEEILARKVSGTEAAEALRDTIRRVVDEIRKLLEEHEKRSAELLEEIRKLLEDILRRSERAVEEIRELLKKGVSTKDVLRIIEEILREHLELLERVVRRIEEILRELLKTIEEIVKRIKEILEELKEVLKRGSVGDDEVEREIRRVKEDLDRILEEYRRLLEEIKRKLEEILRRVEELHRRLRRKLEEIDR

SEQ ID NO: 14255 - protein, 243 aa, Artificial Sequence; identical to SEQ ID NO: 14254
  Synthetic

SEQ ID NO: 14256 - protein, 243 aa, Artificial Sequence; identical to SEQ ID NO: 14254
  Synthetic

SEQ ID NO: 14257 - protein, 243 aa, Artificial Sequence; identical to SEQ ID NO: 14254
  Synthetic

SEQ ID NO: 14258 - protein, 244 aa, Artificial Sequence
  Synthetic
DEDRRLEDAVAKLRKEHADIMKKLDDIMRELDEDHARIKERLDRILEELKALLTRVLRETREDELLRKVLELLTRLLKLLADVLEENKRLLEDILRLLKELIETNLRLLEEILALLRKVARGPVSEEEAKRLVEEITRLLEASTEEARKLVETIKRLLEESLDKLRSLVEEIERRLRTVLEEIRRRGAPEEIERIIRRVIEVIREILDLVRKVNKKALRVIEEILEDLARVNKKAVDAIDELAK

SEQ ID NO: 14259 - protein, 244 aa, Artificial Sequence; identical to SEQ ID NO: 14258
  Synthetic

SEQ ID NO: 14260 - protein, 244 aa, Artificial Sequence; identical to SEQ ID NO: 14258
  Synthetic

SEQ ID NO: 14261 - protein, 244 aa, Artificial Sequence; identical to SEQ ID NO: 14258
  Synthetic

SEQ ID NO: 14262 - protein, 240 aa, Artificial Sequence
  Synthetic
DEVEELLKRVRELLKASEELVRKILEDVKRLLERSIEEVEDLLRKVEELLKRLLDLVERGGSLDEILRELVRLLKEIVRKVLELNRKLVEDVIRIAKRLLELNAESVKEWDRILKLLRDGTGDKEELLKDAEEALEKYERAVREILKELEEIIKEYVRRVEELLKELKDAVDKAKDEVRKGSGDEDLIRDVDRVLKEIMDLLRDLVRRTKELLEELLRLLEELVRAHKELVRSILDEIRK

SEQ ID NO: 14263 - protein, 240 aa, Artificial Sequence; identical to SEQ ID NO: 14262
  Synthetic

SEQ ID NO: 14264 - protein, 240 aa, Artificial Sequence; identical to SEQ ID NO: 14262
  Synthetic

SEQ ID NO: 14265 - protein, 240 aa, Artificial Sequence; identical to SEQ ID NO: 14262
  Synthetic

SEQ ID NO: 14266 - protein, 247 aa, Artificial Sequence
  Synthetic
SEAEELLRELEELLKKSEKVLEDLLRKNAELIKDSKARLDEVRRKVEKLAEEVEEVIRRGVSEEELIRVIKKVLDDLRSIIKELIEVSRKYLRTTLELVKELLDVSRDVLREVLRIIKALLDTGGKDGSEEKIKEIADVADEIRKLAEEDIRLIKKLLEESAKLVDEDVRKLEEIAKEITELVERLRRTGDKDAVRKLIEELKKLLEDLVEHHERLLKEDHERLKALLDHHRELLKTVLTILRETAK

SEQ ID NO: 14267 - protein, 247 aa, Artificial Sequence; identical to SEQ ID NO: 14266
  Synthetic

SEQ ID NO: 14268 - protein, 247 aa, Artificial Sequence; identical to SEQ ID NO: 14266
  Synthetic

SEQ ID NO: 14269 - protein, 247 aa, Artificial Sequence; identical to SEQ ID NO: 14266
  Synthetic

SEQ ID NO: 14270 - protein, 245 aa, Artificial Sequence
  Synthetic
DEEELLRRVTEELKRLLDEARKLHEDVKRELEKLLKENDDLLADVKRKLESLLEALKRGSGTADEVIERILRLVEELLKRHAETVERILKLVRDLLRLHEKLVKEILDLLTRLLELLERRGGSGNSEKVDALKKLAKSVVDEVERSLEELRRLVEEVIKRIRDSLRASARIVKEAVRELRELLRDGRDADKLLERIRALLETLLEVLKRDNEEIKRILEELLRVAEENLRRIKEIIDRLLDATRR

SEQ ID NO: 14271 - protein, 245 aa, Artificial Sequence; identical to SEQ ID NO: 14270
  Synthetic

SEQ ID NO: 14272 - protein, 245 aa, Artificial Sequence; identical to SEQ ID NO: 14270
  Synthetic

SEQ ID NO: 14273 - protein, 245 aa, Artificial Sequence; identical to SEQ ID NO: 14270
  Synthetic

SEQ ID NO: 14274 - protein, 249 aa, Artificial Sequence
  Synthetic
DAEEVVKRLADVLRENDETIRKVVEDLVRIAEENDRLWKKLVEDIAEILRRIVELLRRGGVPEELLDRLAKVVKSIVEKAEKILERLNRVSKAIAEKLKTIVDELNEVSKEIVKRAEDILRKGKDKETVLRALRTLVKEYADLSKEVLERVERIVREYVKLSDEVVKSLAEIVEELIRIIEDLLRKGNLDEDVKRALEELVSRLRKLLEDVKKASEDIVREVERIVRELAKRSDEILKKLEDIVEKLRE

SEQ ID NO: 14275 - protein, 249 aa, Artificial Sequence; identical to SEQ ID NO: 14274
  Synthetic

SEQ ID NO: 14276 - protein, 249 aa, Artificial Sequence; identical to SEQ ID NO: 14274
  Synthetic

SEQ ID NO: 14277 - protein, 249 aa, Artificial Sequence; identical to SEQ ID NO: 14274
  Synthetic

SEQ ID NO: 14278 - protein, 240 aa, Artificial Sequence
  Synthetic
DKDKRLEELLKRLKELNDKTFEELERILEELKRANEASLREAERILEELRARIEGGNLDKRLAELLKKLLDDLKRLLEEYTRTNEELLKRLRELLERYRETNKKLLDLLRKLLDEARRTGTDEDLLRRLEDILRKYEDEVRRLLKELEDILREYEDTSRRLLEELERIAKEAAERVSRGSDKDVKDIIRTILEVARDLLRLLEEDSRTNSEVVKRLLDLLREDSKANSEVVKRLLDVLRE

SEQ ID NO: 14279 - protein, 240 aa, Artificial Sequence; identical to SEQ ID NO: 14278
  Synthetic

SEQ ID NO: 14280 - protein, 240 aa, Artificial Sequence; identical to SEQ ID NO: 14278
  Synthetic

SEQ ID NO: 14281 - protein, 240 aa, Artificial Sequence; identical to SEQ ID NO: 14278
  Synthetic

SEQ ID NO: 14282 - protein, 240 aa, Artificial Sequence
  Synthetic
SKEETLKRLLDELEKRNRETVERLERLLKELEDRNRASLEELEAVLEELERKIEESGLSKELKDTLARILEELRKLLEEYFRKNEELLRLLRKLLDEYARTNEELLRLLEELLDTARRTGGDSELLKRLEDIAREYEKRVRRLLEKLKDILDKYRKTVEELVRKMEEILKEAKKTISRIGSEEVKDIVRAMEEVIRRLIEILRRDVELNLDVAKKLLELLKEDSKLNLDVARELLELLDR

SEQ ID NO: 14283 - protein, 240 aa, Artificial Sequence; identical to SEQ ID NO: 14282
  Synthetic

SEQ ID NO: 14284 - protein, 240 aa, Artificial Sequence; identical to SEQ ID NO: 14282
  Synthetic

SEQ ID NO: 14285 - protein, 240 aa, Artificial Sequence; identical to SEQ ID NO: 14282
  Synthetic

SEQ ID NO: 14286 - protein, 243 aa, Artificial Sequence
  Synthetic
DEEETLRRLLERKVELAKEYLDVSKEVIDRTTKLLDEYLKTSKRIVDATVELLERGDLGPDELIKRLAEELERSLRELEEEIKRLKRELEESLKKLKEIIDRLAEEAEKLLAVLKRGEGSEEEALRALASLVRELIEVLRENDERLRDVLRRLIEALRKNNEILERVLRKLVRAAEERGRDESSREALEEARRRLEELLRELNEITKDLEAKLEKLLRDLNELTKALEEELKRLLDELKKRTD

SEQ ID NO: 14287 - protein, 243 aa, Artificial Sequence; identical to SEQ ID NO: 14286
  Synthetic

SEQ ID NO: 14288 - protein, 243 aa, Artificial Sequence; identical to SEQ ID NO: 14286
  Synthetic

SEQ ID NO: 14289 - protein, 243 aa, Artificial Sequence; identical to SEQ ID NO: 14286
  Synthetic

SEQ ID NO: 14290 - protein, 243 aa, Artificial Sequence
  Synthetic
SEAERTKESLKKVLKALVDLNRELLRKLEENMRELTKLNEEVKRALKEVLDKVREGGIVDKDAEREAERLMRELDKSSEDTARETRKLIEESKKSTRRTEEEARKLTETLDRLAKGGLPREDLLRALVRLLEELARLIEEDVRRNAELVKRHIELVERDVAELLRLIKELVDLLADLAEKGSRTEEIRKIVEEILKEIKELADRYREEVRKSKDKLRSILEDYKRKVDELKERLRELIEEVET

SEQ ID NO: 14291 - protein, 243 aa, Artificial Sequence; identical to SEQ ID NO: 14290
  Synthetic

SEQ ID NO: 14292 - protein, 243 aa, Artificial Sequence; identical to SEQ ID NO: 14290
  Synthetic

SEQ ID NO: 14293 - protein, 243 aa, Artificial Sequence; identical to SEQ ID NO: 14290
  Synthetic

SEQ ID NO: 14294 - protein, 239 aa, Artificial Sequence
  Synthetic
SEVEDILRRLAELNKRLIDKLRELIDRIARLNEELLRVVEDILSRLKRLADELIRVVRERGDIPEELLRKLEEELKKIVDELRRLVEEYEKALRDLIKELRKAVEEYRRTLAELVERLRRLEGPEELLKDLAEDVSRNIKAVEEVIRRFEKNVEDNIEVVRRLVDALEKLVRRLESVLRGKGSDEDLKRLLEKLKEDVERVLKEVRDRTAESLKHLEDVIRELEKKTEDSLRHMEERRK

SEQ ID NO: 14295 - protein, 239 aa, Artificial Sequence; identical to SEQ ID NO: 14294
  Synthetic

SEQ ID NO: 14296 - protein, 239 aa, Artificial Sequence; identical to SEQ ID NO: 14294
  Synthetic

SEQ ID NO: 14297 - protein, 239 aa, Artificial Sequence; identical to SEQ ID NO: 14294
  Synthetic

SEQ ID NO: 14298 - protein, 243 aa, Artificial Sequence
  Synthetic
DEERIIKTLEDINAKLVEDIKRILDKVAELNERLADAIRKILEETKRILEATTRKVRKDGEISEELLRRLEEKLRKLLEDLERVLAEHEDESRRILEEVERLLKRHADASKELLDRARSVARGVKSDKELVDRLKKLIDDSLESVRELIERLKELLDRLVKSVEDLIRTIKELLDRLVEVLREGVSDKDTLRTVEKLVEDVKRRLDKLLEDYKRLIEEVKKELDKLLKEYEDALREIKKRIDE

SEQ ID NO: 14299 - protein, 243 aa, Artificial Sequence; identical to SEQ ID NO: 14298
  Synthetic

SEQ ID NO: 14300 - protein, 243 aa, Artificial Sequence; identical to SEQ ID NO: 14298
  Synthetic

SEQ ID NO: 14301 - protein, 243 aa, Artificial Sequence; identical to SEQ ID NO: 14298
  Synthetic

SEQ ID NO: 14302 - protein, 232 aa, Artificial Sequence
  Synthetic
TEEEVVEDVKRVLDESHDDLRRLIETLTRVLRESLKRIKEALEELERVLKKLLDLLEGGRDAREVLDEIRKVLERLREVIEELLRINKEVLRELERVIRELLKKNEDLARRVRSGVKSRLLEVLERLARESLELNRAILEELRKLVEKSLRAVEKILKRLEEIVRKLLKLVEDGGPREEVKRVLEEARDELRRLLEEYKAIIEELERELERLLREHREVIRRIKEEIDKSSK

SEQ ID NO: 14303 - protein, 232 aa, Artificial Sequence; identical to SEQ ID NO: 14302
  Synthetic

SEQ ID NO: 14304 - protein, 232 aa, Artificial Sequence; identical to SEQ ID NO: 14302
  Synthetic

SEQ ID NO: 14305 - protein, 232 aa, Artificial Sequence; identical to SEQ ID NO: 14302
  Synthetic

SEQ ID NO: 14306 - protein, 234 aa, Artificial Sequence; identical to SEQ ID NO: 13912
  Synthetic

SEQ ID NO: 14307 - protein, 234 aa, Artificial Sequence; identical to SEQ ID NO: 13912
  Synthetic

SEQ ID NO: 14308 - protein, 234 aa, Artificial Sequence; identical to SEQ ID NO: 13912
  Synthetic

SEQ ID NO: 14309 - protein, 234 aa, Artificial Sequence; identical to SEQ ID NO: 13912
  Synthetic

SEQ ID NO: 14310 - protein, 240 aa, Artificial Sequence
  Synthetic
SLEEIVKKLEDLNKKAVEILRRVLEEHEKLVEKVKKVLRDVLRLLEKVVREVIETLKKGDTDEKTREALKELEEVVRKIKEEVEKVLKRLEEVSKRLKDEVRRVLKESEDVAKKIRRDVRGVRSEDAAKRATDLLKETLTILEEAIRRIVKVIEDSLEILREAVEAIVRLLEELLSILARIGLDEEVLRKLKEIIKELKDRLKKLLDDYERIIDELRAELERVLREYEKILEDLRKELED

SEQ ID NO: 14311 - protein, 240 aa, Artificial Sequence; identical to SEQ ID NO: 14310
  Synthetic

SEQ ID NO: 14312 - protein, 240 aa, Artificial Sequence; identical to SEQ ID NO: 14310
  Synthetic

SEQ ID NO: 14313 - protein, 240 aa, Artificial Sequence; identical to SEQ ID NO: 14310
  Synthetic

SEQ ID NO: 14314 - protein, 241 aa, Artificial Sequence
  Synthetic
SADEALEELVRRLLEVLKTVLERTKELSRDDLRVVKEVLRIIEELVKRLLKVIRDGLDDADRVLEEVERVIREAKREVKRWEEVVRKVVEDSRRLIERVLAEVEEVIKEAKRLLDERKSGGSREVIEELLSLLREIVRHHKEVSDEHLKLSAELVKRILDVVEETLRLATEIVRRIKEGGNSEDVRRDIERLLEELKRRVERLLEDIERLLAELEKLNEDVLRENKALLEDLERRVRERKK

SEQ ID NO: 14315 - protein, 241 aa, Artificial Sequence; identical to SEQ ID NO: 14314
  Synthetic

SEQ ID NO: 14316 - protein, 241 aa, Artificial Sequence; identical to SEQ ID NO: 14314
  Synthetic

SEQ ID NO: 14317 - protein, 241 aa, Artificial Sequence; identical to SEQ ID NO: 14314
  Synthetic

SEQ ID NO: 14318 - protein, 58 aa, Artificial Sequence
  Synthetic
DEVRKVLKDVTELSKTSEDKLEKVVREVKRKLDEVNRDLERVVREAKKLLREVRERLE

SEQ ID NO: 14319 - protein, 59 aa, Artificial Sequence
  Synthetic
DEVDEIRRRLKKLLDDSRKTSKDIERRLRELLDRNRRLVERVEEELRKLIKELEELVRS

SEQ ID NO: 14320 - protein, 58 aa, Artificial Sequence
  Synthetic
EEVEKVLKEARDVSEDSKRETTEVLKEAKKALEDINKRLREIVETVREALERVERALT

SEQ ID NO: 14321 - protein, 59 aa, Artificial Sequence
  Synthetic
DEKETVKDVVRRLVEKLEEVVKESKKLVDDLVKRAKEIVRESEELVRRNVRRAEEVARE

SEQ ID NO: 14322 - protein, 55 aa, Artificial Sequence
  Synthetic
EKVLKELEDAVREVKERIKKTNKELEEMVRRVEEEIRESDERLKKASEEVEEKIR

SEQ ID NO: 14323 - protein, 59 aa, Artificial Sequence
  Synthetic
SEMETVLDDVRRVVEESEELVKRARDRVKKLVDDLKRLVEKNEEDVKRVVDELDKLVEK

SEQ ID NO: 14324 - protein, 56 aa, Artificial Sequence
  Synthetic
EEVLEEARRLSERSREELRRVLEEARRLIRRVREELKRVHDKARRLVERVEEKLRT

SEQ ID NO: 14325 - protein, 59 aa, Artificial Sequence
  Synthetic
DEVEEVLERVKKVVADSEELVKRNRERVKKVVDDIRDLIRRNAETVKEVVKTIRELVKK

SEQ ID NO: 14326 - protein, 56 aa, Artificial Sequence
  Synthetic
EEALKDAERRSDESRKKLKKVHDDADRMVREVTRRLDEVHKEAEKRVREVLAELDT

SEQ ID NO: 14327 - protein, 60 aa, Artificial Sequence
  Synthetic
SIEEVLKEAHELNKEANKRLRDVEEDAKRLIEEVLRRLEDVLRESERLAREVLEELKRKG

SEQ ID NO: 14328 - protein, 56 aa, Artificial Sequence
  Synthetic
AKELRRRVERSVEESKRLVDELRKDVKRVVDEIRKVVEEDLRHAKRVVDEIREKVR

SEQ ID NO: 14329 - protein, 59 aa, Artificial Sequence
  Synthetic
DEAEEVKRVVEESVRRNEELVRRNEELVRDVLRRLKEVVDENERLVKEVVDRLRDLVRR

SEQ ID NO: 14330 - protein, 56 aa, Artificial Sequence
  Synthetic
ERVLKEVEELDRRVLEELKRVNDEARKRVRTLLEELRRVNEKVEELVRRILEELKK

SEQ ID NO: 14331 - protein, 57 aa, Artificial Sequence
  Synthetic
DEAEDVVRKVMDEIRKLIEVSKEILKELRRLVEELKKHSDRTVEELRRVVTELLKKE

SEQ ID NO: 14332 - protein, 55 aa, Artificial Sequence
  Synthetic
TDAVRRVRELLETVRRTSEEVLKTLEEFLRRVEKSTRRAEEELEEFLKRVEDRVK

SEQ ID NO: 14333 - protein, 61 aa, Artificial Sequence
  Synthetic
KEADKLAKELEETIERLKRDSERLVTDLERLLERLERRSRELVKRLRRHVEELLKTVRRDG

SEQ ID NO: 14334 - protein, 55 aa, Artificial Sequence
  Synthetic
REVIKKVEDLLREVEETSKRILDRVRELLKKVEDSSRRINEESKKLLKRVEEEAR

SEQ ID NO: 14335 - protein, 58 aa, Artificial Sequence
  Synthetic
SELEKILEDLKRVAERVAKALDRSLRELEKVLRRVEEELTRSNERLREVVKEVEDAAD

SEQ ID NO: 14336 - protein, 56 aa, Artificial Sequence
  Synthetic
DEEVRKLVEDLARRLDDIVRRSEELSRKLAEDVEEIVERSKRLSEELAREARELVR

SEQ ID NO: 14337 - protein, 60 aa, Artificial Sequence
  Synthetic
SEIEDVVRKVETLARESDERVKTLMEENKDLAEKLKKLVRDVVEKVKREVTRLLDEVRRR

SEQ ID NO: 14338 - protein, 58 aa, Artificial Sequence
  Synthetic
EELKKVKERLDEAERRSKELIDEADRLNREMLKRVKEAIKKVKETLDKALEDVERAVR

SEQ ID NO: 14339 - protein, 57 aa, Artificial Sequence
  Synthetic
SDLERVEERLERAVREVEKLHEDSRRELRRVVKEVHDSTRKVEERNRKLVKRVEEAD

SEQ ID NO: 14340 - protein, 55 aa, Artificial Sequence
  Synthetic
KKVIKKLEDMLREWAKLVEKSIKELKELLEELRKVSKKLVDDNDRLAEELKRRVD

SEQ ID NO: 14341 - protein, 61 aa, Artificial Sequence
  Synthetic
DEVKALVDKVRELVRKLKEESDDLVRRNEELAKEVEKRSREVVEKVRDTVRKLLEELERAD

SEQ ID NO: 14342 - protein, 55 aa, Artificial Sequence
  Synthetic
KKVRDDLRKALEDVNRSSKRVEERDKEVLDEAHRSSTRVLETLKRMLERLDEKIR

SEQ ID NO: 14343 - protein, 61 aa, Artificial Sequence
  Synthetic
DEVEKLVKKVEDLVKRLIEVSEDVVREVEKRLRELEKVHREALRKNRKLLEDLLRRLREAD

SEQ ID NO: 14344 - protein, 55 aa, Artificial Sequence
  Synthetic
DKVREKLKRALDRVNKSSREVEETLRRADKRLNDLVKEIKDEDKRMLERLERETQ

SEQ ID NO: 14345 - protein, 61 aa, Artificial Sequence
  Synthetic
KEVEELVKEVRKLATKVIETSKRVVEELEKLAERLLRTSKEVVKRNKELVDDLLRRVREVS

SEQ ID NO: 14346 - protein, 55 aa, Artificial Sequence
  Synthetic
EEVRKELRELLRRVNESSKDVKRRLEDLDREINRLSKRVKEEDRRALKEVEEEIK

SEQ ID NO: 14347 - protein, 60 aa, Artificial Sequence
  Synthetic
SKEEEVKRVLREALERVEELNKRLNEEDKRMLDEVRKVNRDAERVLREALKRVEELLSRV

SEQ ID NO: 14348 - protein, 55 aa, Artificial Sequence
  Synthetic
DELVTDVERVVRELLDHVRRLVRESKELARELIRRSEEIVRTVEEVVRKLEKDVR

SEQ ID NO: 14349 - protein, 60 aa, Artificial Sequence
  Synthetic
DKAKKVEELLRKAIEEVEKLNDEVNRTDEKMLRRVKELNDDVHRTLEEAIKRVRELLSRV

SEQ ID NO: 14350 - protein, 55 aa, Artificial Sequence
  Synthetic
DEVVTEVEKLMRELLEHVKRLIDESRKLAADLEKHSRDIVEEVRRLVEELLRTVK

SEQ ID NO: 14351 - protein, 60 aa, Artificial Sequence
  Synthetic
SKERDVERKVREVIKRVEDLNKRVHKTLEDVIREVEKLNEEVKTRVEKLIREVEELLKRV

SEQ ID NO: 14352 - protein, 55 aa, Artificial Sequence
  Synthetic
DRVVEEVERLLRELEKHSKEIEEAVDRLVRKLEEHVKKVVEEVARLVAELKERVK

SEQ ID NO: 14353 - protein, 60 aa, Artificial Sequence
  Synthetic
SVAEEVKKVKDKLKKDVERLNEEDRRVLEKAKRESKKLLDEIKRVLEELERKLEELLRRD

SEQ ID NO: 14354 - protein, 55 aa, Artificial Sequence
  Synthetic
KEVVTEIRRVVKELLDKVRESIKETERVVRELLERNRKILKEIREVVRKLLEDVR

SEQ ID NO: 14355 - protein, 61 aa, Artificial Sequence
  Synthetic
DEARKLLEELKRLAERVLKTDTDLLDESRRILEEVLKTNKKSIEDSKRLAEDVLRKVAREG

SEQ ID NO: 14356 - protein, 59 aa, Artificial Sequence
  Synthetic
EEVLDRVREIMERVLTESKELNDRIHTISRKAEEDSKRLNEEDRAIMEDVRRELKRVVD

SEQ ID NO: 14357 - protein, 61 aa, Artificial Sequence
  Synthetic
SEAEKLLEELRTIAKEVLDRVRKMLRESEKLAEDVLRENKKSIEDSRRIAKKVLDELRRDG

SEQ ID NO: 14358 - protein, 59 aa, Artificial Sequence
  Synthetic
EEVLERIRRIFEDVLRKLRKLLDEIHRISEKVKKESEELNEEDKRIVDDAERRLEDLER

SEQ ID NO: 14359 - protein, 60 aa, Artificial Sequence
  Synthetic
SVKDAVEKILREAEETVKRLNEETKRRLDEAREESKRLIDEVRRILEKLKEVLDEVLRRV

SEQ ID NO: 14360 - protein, 55 aa, Artificial Sequence
  Synthetic
EELLERVKRLMDELEETSRRILEEVERVIRRNKELADRILKEVAELLKRLEEELR

SEQ ID NO: 14361 - protein, 60 aa, Artificial Sequence
  Synthetic
DEAEELRKTVEDIMKELREELKRLEEESRRIMEELKKRLEKLIEDSRKAAEDLKREADRL

SEQ ID NO: 14362 - protein, 59 aa, Artificial Sequence
  Synthetic
KRLLEEIKERVDRVKKELDEADKRINDSSREVEKTLEDLDRKINKSSEEVRRVLEEAER

SEQ ID NO: 14363 - protein, 60 aa, Artificial Sequence
  Synthetic
DVEETLTRLLKEILDVVRKALRDTREIVRDVRRVSEEVLKELEDLLREVDREVKRVLAEL

SEQ ID NO: 14364 - protein, 56 aa, Artificial Sequence
  Synthetic
DTEVVKRIRELVEKLRELVKRSNDNLKEHVKRNKELAKRLLDELRKLVEDLKRARK

SEQ ID NO: 14365 - protein, 60 aa, Artificial Sequence
  Synthetic
DMEEEVKKLIDEVRRVLEEVLKRVEDIIDASRRTLKKVVDDVRRIDEDVERELKEAEKRG

SEQ ID NO: 14366 - protein, 56 aa, Artificial Sequence
  Synthetic
KEEVLREVDRLVKKVEKTARELLRLLEESIEKSKREAEKLLRSNEDVVRRVRERVR

SEQ ID NO: 14367 - protein, 56 aa, Artificial Sequence
  Synthetic
DAEEDAKRLLKEVKDLLDEVRERHRELNERSRKVLEDARKTHEDLNEESRKTLEDR

SEQ ID NO: 14368 - protein, 55 aa, Artificial Sequence
  Synthetic
REARELLKRILKDIERILETVVRLSERDVEEVRKIMEELKKLSDDDLKRVEEEAR

SEQ ID NO: 14369 - protein, 56 aa, Artificial Sequence
  Synthetic
SAREEIEELIKRVKDTSKKILEDVRRMIERVKRKSKKIKEDAKRLIERVEKLLRDS

SEQ ID NO: 14370 - protein, 56 aa, Artificial Sequence
  Synthetic
KDELRELIKRLEDHSRRVVEEVARLVKELDEHSERVLKTLEDLIRRLDELVKRVTT

SEQ ID NO: 14371 - protein, 57 aa, Artificial Sequence
  Synthetic
KAEETVKELLDRVERISERARKEVRELLERSKESTKRILDEAREMIKRSRDELRRVG

SEQ ID NO: 14372 - protein, 56 aa, Artificial Sequence
  Synthetic
LEDLERLARELARHSEDVMRRLRDLARKDKELSEDLVRRLRELVKRDLDLVKTVKE

SEQ ID NO: 14373 - protein, 56 aa, Artificial Sequence
  Synthetic
SMEDRLREVNEKNNRLIEDATRKSERVLDKIRELLKEVKRRSEDVLRRIKELVEKL

SEQ ID NO: 14374 - protein, 59 aa, Artificial Sequence
  Synthetic
EKTLKELVEKIEKVAEDSLREAEEDVKRIEDLVREIKKRADDDVRRLEDRVRRLRERLE

SEQ ID NO: 14375 - protein, 59 aa, Artificial Sequence
  Synthetic
SSVEEVVEEIERLVDELRKRAEELVRESEKLVAELERRIRKLVEDSEKLVKDLKDRAAK

SEQ ID NO: 14376 - protein, 59 aa, Artificial Sequence
  Synthetic
DKVLRKIEDVDRRLKELVRRVKKKDRDSNERVKELVKRLNDENEKVLKRVEELVRRDKT

SEQ ID NO: 14377 - protein, 60 aa, Artificial Sequence
  Synthetic
DEIKKVVKDLEDLVKRLKDEVDRHVRENERIVEELKRNVDRHVEENRRLVKTLEDEVRKG

SEQ ID NO: 14378 - protein, 55 aa, Artificial Sequence
  Synthetic
EDLKRVLKAVEDVVREAKERLERVNRTIREVVKRAREKLKRVHDTIRKVVDDARR

SEQ ID NO: 14379 - protein, 59 aa, Artificial Sequence
  Synthetic
DEVEEVLKELKRSVDETRKLLKKIEDEAKRNVRRNEELAERVKRTVDRLVEELRDLIRR

SEQ ID NO: 14380 - protein, 55 aa, Artificial Sequence
  Synthetic
EKLKRAEKEDEEVVRRIRELIERLREENEDVIRRAEELLREVVKRIEEVITEARR

SEQ ID NO: 14381 - protein, 60 aa, Artificial Sequence
  Synthetic
SVEDEIRRVIEELDRLLRKDKETIKRVIKELRDLLREVKKRTEEMIRRLDELLETVTRRI

SEQ ID NO: 14382 - protein, 56 aa, Artificial Sequence
  Synthetic
VDDVRRLAKEVLDEVKKSVDETKRLADEVKTRVRKNVKDNTDLAREVLRRVAERAR

SEQ ID NO: 14383 - protein, 60 aa, Artificial Sequence
  Synthetic
SRLEKLVKEIRDVVRELAERVKESVDRARKVVKEDLEHAEESVRRVKKVVKELEELVRKL

SEQ ID NO: 14384 - protein, 55 aa, Artificial Sequence
  Synthetic
KDIKEVEKRLKDVLDEAHKLNKRTNDELKRVNKESNDLNRKTEEDLKRVLERAED

SEQ ID NO: 14385 - protein, 59 aa, Artificial Sequence
  Synthetic
KRKEDLVEEIRKIVKAVEDEVRRSVKESEDSVRENLKEAERIVRELEEIVKELEKLVRD

SEQ ID NO: 14386 - protein, 55 aa, Artificial Sequence
  Synthetic
ELLEDVRKKLEDVLREVEKLNKTVEDKNREVLRRIDELIRRVEEAIEDVRRKVEK

SEQ ID NO: 14387 - protein, 59 aa, Artificial Sequence
  Synthetic
DEKEELVKRVEDKVKDLRDKVEKSVRESTESVRDNERRVRESVERSRDLVRRLDELVRA

SEQ ID NO: 14388 - protein, 55 aa, Artificial Sequence
  Synthetic
EELERVRKELEEVLRRAKRLNEDVLEKNREVVRRAAELNKEVKKLLKEVLDRAKT

SEQ ID NO: 14389 - protein, 60 aa, Artificial Sequence
  Synthetic
DEKEDIDRRLRDMVRRDRELARRSVEEARKLVDKNRKLVERVFRELKKLVDELDELVRRR

SEQ ID NO: 14390 - protein, 55 aa, Artificial Sequence
  Synthetic
KLLKDLEEELRKTREEVHRLNEETNRRLDKVNKDARDLVRELEELIEDVLRKVET

SEQ ID NO: 14391 - protein, 59 aa, Artificial Sequence
  Synthetic
DEKETVEERLDRLVRHHEKLVRESVKELEELVRHNRELIKKSVEDARRLVEDLKRLIDE

SEQ ID NO: 14392 - protein, 55 aa, Artificial Sequence
  Synthetic
KLLDELRERIDKVNEDARKLNEEVERRITESEKEVTDLNRKVDEDIKRVLEKVER

SEQ ID NO: 14393 - protein, 60 aa, Artificial Sequence
  Synthetic
SVEKVVKDVTDTIKKVVDDARRLSEEVVERNERVNKKLERLSREVVERIKDVLKRLRDKK

SEQ ID NO: 14394 - protein, 56 aa, Artificial Sequence
  Synthetic
VEDLKRDADRIVEDIKRVVKELVKHAEKSVEDLERVVKEIVKDAERIVREIEKRVK

SEQ ID NO: 14395 - protein, 60 aa, Artificial Sequence
  Synthetic
DVEEVVRRAREENKRSHDEVRELVKEVNERNKTVLERIKELAERALREIREVLREVDERK

SEQ ID NO: 14396 - protein, 56 aa, Artificial Sequence
  Synthetic
TEKLKEDLDRIVRTSEELVRRLLERARRMVRETEELMRELLTEVKRIVEEVARRVK

SEQ ID NO: 14397 - protein, 59 aa, Artificial Sequence
  Synthetic
DKEELLKRVTEKLEKVSDKSRRLIEEVEREVEKVHREVEERVRKVREDVRDVLRKIRAQ

SEQ ID NO: 14398 - protein, 56 aa, Artificial Sequence
  Synthetic
TELVLREVERLVAENERSVEELKKELEKLVRRNRTLVRKIEEDVRRLVEKITKRRE

SEQ ID NO: 14399 - protein, 59 aa, Artificial Sequence
  Synthetic
SDSERVKKEAEDVLREIKRLIERNKRLAEETSERIRRLLEELKDLADKIVETLKDLIDR

SEQ ID NO: 14400 - protein, 56 aa, Artificial Sequence
  Synthetic
REVVDEVEKRIRELLERLKDVSKKVEESNKKLLDEIRETVERVKKRIKELLEELRR

SEQ ID NO: 14401 - protein, 60 aa, Artificial Sequence
  Synthetic
SLEEVVEEVKRRLTKLLKEIEDVIRRAEEESRRLLEEIERVIREAEKESRRLLEEIRTAG

SEQ ID NO: 14402 - protein, 56 aa, Artificial Sequence
  Synthetic
EDLVRKLAKELLDTLREVLKRIEEIAKEVLDLNDESLKEIRRIVEEDLRKLEEKMR

SEQ ID NO: 14403 - protein, 59 aa, Artificial Sequence
  Synthetic
SEEEEVKRLLDDVREKVKRVAEENRRTVEEVKRVVDEVRRRNKETVERDRRELEKVARD

SEQ ID NO: 14404 - protein, 55 aa, Artificial Sequence
  Synthetic
EEVVREIRRIVEDVRRKVKESVDRVKKILEKVRKDVEDSVREVERTMKKVSDDVT

SEQ ID NO: 14405 - protein, 63 aa, Artificial Sequence
  Synthetic
SKEETAKRLIEEVRKVIEEVKKRAEDSNDHNRRSIEEVEKTLKRLIDEVRRVVEEVKEKISRT

SEQ ID NO: 14406 - protein, 55 aa, Artificial Sequence
  Synthetic
KEAVEEIERLMRKIKKVVEDSVRNVERTMREVEEKVRKVEEDVRRLAEDVTRAVK

SEQ ID NO: 14407 - protein, 56 aa, Artificial Sequence
  Synthetic
DEVEEVLRRVRKIVKEDRDEAKDVREENRRLVEDDKRKVERVKEENRRLVEELRKR

SEQ ID NO: 14408 - protein, 56 aa, Artificial Sequence
  Synthetic
RRLLEEVERRVEKLVKESREIAKRSNDRTKDLVRRSEEILRESNERTRRLLEETER

SEQ ID NO: 14409 - protein, 56 aa, Artificial Sequence
  Synthetic
SEAEKVLKDIEKIVKDLERNAKEVLDRNKRNVEDDKRAAEEVLEKLERIVREIDRG

SEQ ID NO: 14410 - protein, 56 aa, Artificial Sequence
  Synthetic
RELLKKVIRTVEKLLEDVHKLNEDSERAAKKLTDESREIAREVEERVERLLREEER

SEQ ID NO: 14411 - protein, 57 aa, Artificial Sequence
  Synthetic
REVEEAEKRLREIVKEVTERNKEVVERLRDIVRKSEDDSRKSVETNKEIVDRVRRDV

SEQ ID NO: 14412 - protein, 56 aa, Artificial Sequence
  Synthetic
RDVLRELIRTLEEVLKRSEDTNRELEKRIKEVVEDNRRKLEESIKESEKVVDEIRK

SEQ ID NO: 14413 - protein, 57 aa, Artificial Sequence
  Synthetic
SEVEEAERRLKEIAEESKEISKRSVETNAKILDEVRRENTRVLETLKKILEEVERRV

SEQ ID NO: 14414 - protein, 56 aa, Artificial Sequence
  Synthetic
KDELERLIEDIREVVERNKKIADESIKRSRDVVKRSKETNDELEKTIREVVKRIED

SEQ ID NO: 14415 - protein, 57 aa, Artificial Sequence
  Synthetic
DEVEEVLKRLRDILREAKELVERSVKRNEEIAEESRKESEESVRRNEEIVDAVRKRV

SEQ ID NO: 14416 - protein, 56 aa, Artificial Sequence
  Synthetic
RRVLERLIRELERVLEELREKLKRSIEESEDVVRKNREILRRSIEKSEDVVRKIET

SEQ ID NO: 14417 - protein, 59 aa, Artificial Sequence
  Synthetic
DVDEVLDTVRRLVEELLKKVERTSRESVRLAEKLLDEVRESSKRSKDESRRLLEEVREI

SEQ ID NO: 14418 - protein, 59 aa, Artificial Sequence
  Synthetic
REKVDKVRRDVERLVEEVEKTVKRSVEENRRIAEEIKRTVEESVKTNEEVVKRIEETAR

SEQ ID NO: 14419 - protein, 58 aa, Artificial Sequence
  Synthetic
RERELVEEVERRLRESNERVKESVDRSRKLLETSHRRVKELVDRLKRVLERVEREVRN

SEQ ID NO: 14420 - protein, 55 aa, Artificial Sequence
  Synthetic
DELVKRVKEVVDHNERLAEESKKEVDDVVRRNEDLVRKVVEEVKDVVRRIKETVR

SEQ ID NO: 14421 - protein, 58 aa, Artificial Sequence
  Synthetic
RERELVEEVERELKRSTREVEESIEESRKRLEESHRLVAELVKRLEEVLERVRDDVRR

SEQ ID NO: 14422 - protein, 55 aa, Artificial Sequence
  Synthetic
DELRKRVEEVVRTNEELARESVRKVKEVVRRNKELVARVADKVREVVKRIRETLK

SEQ ID NO: 14423 - protein, 59 aa, Artificial Sequence
  Synthetic
SVKEIVKKVVEENKKSDDELREFARRVAERNKRVVEELKKRLEDLVRKNEEVVDRLRKR

SEQ ID NO: 14424 - protein, 59 aa, Artificial Sequence
  Synthetic
SEIVKEVVDRVRKSEESSRKLLEEIVRLVEKSLEEVKRILDEIRRRVEKSERDVRRLRK

SEQ ID NO: 14425 - protein, 57 aa, Artificial Sequence
  Synthetic
DIVEELKENVKRVEETIRKIVKEARENVDDVLKKNKDNVEHDKRTAEEVLKEVKKSI

SEQ ID NO: 14426 - protein, 60 aa, Artificial Sequence
  Synthetic
KDTVRRLLEEASKLNKDVIRRVRELLKRLHERNEESLRRARELNERSRREAERVLEEVRK

SEQ ID NO: 14427 - protein, 60 aa, Artificial Sequence
  Synthetic
SIVDRIREIMKEVREKVKRVVEENRRNAERIKRRVDEVVKTNRKTVDDVRRKVEDVVRKI

SEQ ID NO: 14428 - protein, 60 aa, Artificial Sequence
  Synthetic
REVVEELLRRLRKIVKDVERELKRSTEELNRRSREVLKELEKSTRDVEKVVRELEERLRK

SEQ ID NO: 14429 - protein, 60 aa, Artificial Sequence
  Synthetic
SVVDKIREIVRKSREDVRRVVEEIKDNARDLKRKAEEVVKEVKRIVDEVRETVRDVVEKI

SEQ ID NO: 14430 - protein, 60 aa, Artificial Sequence
  Synthetic
EEEARKLLEDVKKSSDDVRRELKRLLEEVNRVSREAEKKLRELLERVKRIIDTLKDELRK

SEQ ID NO: 14431 - protein, 60 aa, Artificial Sequence
  Synthetic
SVKDEIRRIVKESEEANRDVVEKIRRNVERIRRKVERVVEEIKRIVKEVKEKVEDVVRKN

SEQ ID NO: 14432 - protein, 60 aa, Artificial Sequence
  Synthetic
EEVVRKLLEEVKKSSDESKDRSRRLLEEVNRISRDVERKLEELLRKVEKVVRDLEEELRR

SEQ ID NO: 14433 - protein, 58 aa, Artificial Sequence
  Synthetic
SAEDVVRELKKRVDRSREDNTRVLEELKKAVEESRRLNEESNRRLEKIVRDIKEDLKR

SEQ ID NO: 14434 - protein, 59 aa, Artificial Sequence
  Synthetic
EEVLRELAKIREDIERENKRVLEELEDVLRKVKRVNEEALKNSEDILRDIKEKVDRRRK

SEQ ID NO: 14435 - protein, 59 aa, Artificial Sequence
  Synthetic
SVEELLRKLEEVLRKIREENERSLKELRDRAREIVKRNRETNRELEEVIKELEKRLSRR

SEQ ID NO: 14436 - protein, 59 aa, Artificial Sequence
  Synthetic
EDIVRKIERIVETIEREVRESVKKVEEIARDIRRKVDESVKNVEKLLRDVDKKARDRKK

SEQ ID NO: 14437 - protein, 61 aa, Artificial Sequence
  Synthetic
SEEEKVKEEIRKLIEDSRRHVDELKKRLEKLLRDSEKNVEDAHRTNEKLARELKEKVKKTG

SEQ ID NO: 14438 - protein, 55 aa, Artificial Sequence
  Synthetic
EDVLREAEEMLRDSNRELREILEKIERDLRKSDEELKKSVDDLRRLIKEVEDRLK

SEQ ID NO: 14439 - protein, 61 aa, Artificial Sequence
  Synthetic
SREEELKKELKKRIEDSDRHVKEEKDELDRLIRESEEHVKRLKEEARKKLERLKDLVRKDG

SEQ ID NO: 14440 - protein, 55 aa, Artificial Sequence
  Synthetic
EKVLREAEELLKEVDRKLERILEEIKRRLEKSDRDLRRVLKELEELIDEVRRRLE

SEQ ID NO: 14441 - protein, 61 aa, Artificial Sequence
  Synthetic
SEKEDIKERIKELLKRSEENVRKLREENRELVRRSEENVKEIHKENEDLIRKLEKLRTRDV

SEQ ID NO: 14442 - protein, 55 aa, Artificial Sequence
  Synthetic
EDVLREAKEALEESLRRLRKIHEDSERRLRESLEELRRSVEEAKRLLERLKRELD

SEQ ID NO: 14443 - protein, 61 aa, Artificial Sequence
  Synthetic
DELDRVIEEAEELIRRIEEKLRRINETAKRLLDENLRHSERVHEEINRALERVRKKVEDAG

SEQ ID NO: 14444 - protein, 56 aa, Artificial Sequence
  Synthetic
VKDVKDRLRRIIEELERRVRELKKRHEDILRELNRRSKELKDRHKKILEDLDRRVR

SEQ ID NO: 14445 - protein, 61 aa, Artificial Sequence
  Synthetic
EEVERVIDEARRLLRENERHSEEVIEEITKLIRDVEEKVKRINDRAREALEDIREEVKRKG

SEQ ID NO: 14446 - protein, 56 aa, Artificial Sequence
  Synthetic
VDELRKELERLIRDLNRLSKRIKEELKRRIEELEEEVKRLKEEHERIIEELRRRVK

SEQ ID NO: 14447 - protein, 59 aa, Artificial Sequence
  Synthetic
EEVERAKKELEDRIREWEEDSKRLKDELKRIIKEWEDESRRVKEELRKIIDDLRKAVEK

SEQ ID NO: 14448 - protein, 55 aa, Artificial Sequence
  Synthetic
ERILEEARRLVRRVHESSKRVLDDARRKLKELHERSKRVLDDVRRKLKKVADDTR

SEQ ID NO: 14449 - protein, 60 aa, Artificial Sequence
  Synthetic
SEVERIKEELKRIIEDWDRRSRRLKEELKKEIKDWEEDSRRLKRELEEELKKLKEKVERG

SEQ ID NO: 14450 - protein, 55 aa, Artificial Sequence
  Synthetic
KKIIDEARRLLEELHRKSREVAKEIRKEVKRLHDTSKKVLEDIRRAVKKVADDVK

SEQ ID NO: 14451 - protein, 59 aa, Artificial Sequence
  Synthetic
SEVEKIKRDLEEIIRRWEEDIKRVKKRLDEEIRRWEEESKKVKKKLEDLIRRLEKEVAD

SEQ ID NO: 14452 - protein, 55 aa, Artificial Sequence
  Synthetic
EKILEDARREAERLHKTSKDVLKKVEDLLRRVNEHSRRVLEEAERRIRDVAEKTR

SEQ ID NO: 14453 - protein, 59 aa, Artificial Sequence
  Synthetic
SEVEDIKRRLEKIIEDWRRKSKELEKRLEDIIDEWDKRSRKLKEDLKRIIEEARKAVDD

SEQ ID NO: 14454 - protein, 55 aa, Artificial Sequence
  Synthetic
EKVIKEAEDLLRELNESSRRVAKKAKDDLRELNERSRRALKEIRELLREVRERVE

SEQ ID NO: 14455 - protein, 61 aa, Artificial Sequence
  Synthetic
REVEKIITDLEEVIRRVEEYLKRSDEELEKELRRVKRYLDKSDKDLRDEIRRVKEELDKRG

SEQ ID NO: 14456 - protein, 56 aa, Artificial Sequence
  Synthetic
KDELRARVEDVVRRAEDELRRHSELNKRLVDEARKLLEDHSRRNEELMRELRKLVE

SEQ ID NO: 14457 - protein, 60 aa, Artificial Sequence
  Synthetic
SELEDILRKLEKRMTDVERYLDESNKDLERAVRRVVETLKRIDDEIRRLLEEVERDLDRK

SEQ ID NO: 14458 - protein, 56 aa, Artificial Sequence
  Synthetic
KDELETRLREITKTAEDELRKHSRTNEDIVRELKELVDEHEKELRKVVREAEDESR

SEQ ID NO: 14459 - protein, 61 aa, Artificial Sequence
  Synthetic
SELEEILKDLERMIREVEDYLRKSNERLEDVLRKVKKKLDEINDELRRVVEEVKKKLEDKG

SEQ ID NO: 14460 - protein, 56 aa, Artificial Sequence
  Synthetic
AEELKRRLEEIVKRARDLLKEHSDDNERLVERAERLVEEHRDKVRKIVEELEEEVR

SEQ ID NO: 14461 - protein, 61 aa, Artificial Sequence
  Synthetic
SEIERILEEVERAVRESDERLKDIVRKDREVVKRVKELLDKILRKDEEAIKRVIEDLERRG

SEQ ID NO: 14462 - protein, 56 aa, Artificial Sequence
  Synthetic
KDELKKEVDKWVKRARDIVKELEEHSRRSTDELRRTVEDLERHSEESVRRAEKTSE

SEQ ID NO: 14463 - protein, 61 aa, Artificial Sequence
  Synthetic
SELEKILKKIEDALKKVEEDLDRILEEDRKTLEEVKERLERDNEDLKRVVERVEEELKRRG

SEQ ID NO: 14464 - protein, 56 aa, Artificial Sequence
  Synthetic
TDELRKDVDRLVKRLKKLVDDLRRKSKETADRLRELVKRSRELSRTLAEELRKKTE

SEQ ID NO: 14465 - protein, 59 aa, Artificial Sequence
  Synthetic
SEDEEAKKRVEDLVRELKKSNDELRRKSEESLRRLKELNDELRKRVRDLEDRLRKLVED

SEQ ID NO: 14466 - protein, 55 aa, Artificial Sequence
  Synthetic
ERIIEELDKELKKSSEETDEIVKRDEDVLRRSDEESRRIIKKLEDVLRRADERVK

SEQ ID NO: 14467 - protein, 60 aa, Artificial Sequence
  Synthetic
SKDEEAKKRVEELTRKLEETVREDKKRIEDLAEKLKKVVDKLRRDSERTRKKLEEVERKG

SEQ ID NO: 14468 - protein, 55 aa, Artificial Sequence
  Synthetic
ERILRELEKVLREVKKKHKETLRTLEELLREVAKRAEDINEEDRKVLEDVVRKLT

SEQ ID NO: 14469 - protein, 61 aa, Artificial Sequence
  Synthetic
SEVEEILEDIRRRMTRVEERLRKSNKELEDAIREVTKRLKKSLDDLKKIIEEVKDVADKKG

SEQ ID NO: 14470 - protein, 56 aa, Artificial Sequence
  Synthetic
AEELRKMVEDLTKELEDLVEEDKERVKRWRDELEEIVKRDRDKVERWREEAEKIKK

SEQ ID NO: 14471 - protein, 61 aa, Artificial Sequence
  Synthetic
SELEEILRDVERLVRKVKTDLDDSLRRLKEVIDDVERLLRESNEKLRRVIKDVEDLADKKG

SEQ ID NO: 14472 - protein, 56 aa, Artificial Sequence
  Synthetic
EEALKKLVEDLRKRLREVVEEDKEKVRRWTEKAKRIVEDDKRRVEEWERKLEETVR

SEQ ID NO: 14473 - protein, 62 aa, Artificial Sequence
  Synthetic
DEVERVLDDVRRKLEKVRRDLRRIDEDLRRVVETVKRLLDESNKDLERAVRKVKDELDKKVR

SEQ ID NO: 14474 - protein, 56 aa, Artificial Sequence
  Synthetic
EEELRRVVKELKEDLERLVRELEETVREVKEELEKVVRDDEKLVEEWKKRLEERSR

SEQ ID NO: 14475 - protein, 61 aa, Artificial Sequence
  Synthetic
EEVERVLDDIRRVVEEVKRRLDEIDKKLTEENERVKEELDRIDDRLRKLVEEVKRRLDEKV

SEQ ID NO: 14476 - protein, 56 aa, Artificial Sequence
  Synthetic
REELEKVVEDIKRKLEKAVRDLEKTVKENKDRNDDIVRRVKKTVDDAEERLRRAVK

SEQ ID NO: 14477 - protein, 61 aa, Artificial Sequence
  Synthetic
KEVEDILRELRRAVEEHRRRSEELLRRMRKLVKDLEDRIREILERARRSVKEIKDRIEKDG

SEQ ID NO: 14478 - protein, 56 aa, Artificial Sequence
  Synthetic
EEVLKEVKKLLDEVRKRSKDIVDEVRKLLEEVLKEAERVLREWKKLNDEVEDRLRQ

SEQ ID NO: 14479 - protein, 61 aa, Artificial Sequence
  Synthetic
SEVEEVLKEVRKLIEDWRANSERILRRIERAIRELRRKIREWLERSKKKIKRLEEVIDKEV

SEQ ID NO: 14480 - protein, 56 aa, Artificial Sequence
  Synthetic
EDVLREARKRVDELEKRSREVAKRARDLLKEVRDKIKEVADRSRDLLRKVEEAIEK

SEQ ID NO: 14481 - protein, 60 aa, Artificial Sequence
  Synthetic
SAEEVDRRVEELLKELERRSEEVLETWKELNKKLNKDAKDVTDEVRELLKELAELIKRDG

SEQ ID NO: 14482 - protein, 59 aa, Artificial Sequence
  Synthetic
EEVVRRLLEDLRRLIDEWRKRSKEVEEEVRKSIEDIKRRIEEILRRIRKLIEEIRRRIK

SEQ ID NO: 14483 - protein, 59 aa, Artificial Sequence
  Synthetic
DEDERVKDLLRRVKKTVDELLEELKREVKKSREEAKRLLKELEDRLRRSRKEAEKLRSS

SEQ ID NO: 14484 - protein, 56 aa, Artificial Sequence
  Synthetic
REVLEEAKKILDDARRAIEEIIREWEEVNKEVDDRIDRIVEEWRKVNDKVNKDLTT

SEQ ID NO: 14485 - protein, 61 aa, Artificial Sequence
  Synthetic
SEEEKIVEDLRREVKRLAERVKELIETSKKLVEDSKRHVKDLARRLRDIIRKLKKDLRDKG

SEQ ID NO: 14486 - protein, 55 aa, Artificial Sequence
  Synthetic
RRALEELEKVVREIRRELERVHEETRRVIEESNRELEEILREAKELLEEVKKEAE

SEQ ID NO: 14487 - protein, 64 aa, Artificial Sequence
  Synthetic
RELEKALEEAKRLLDKVRKELKKIHEESRRLLKETRDETRRVLEEAERLLREIKKLIDRLREDR

SEQ ID NO: 14488 - protein, 59 aa, Artificial Sequence
  Synthetic
EEDVRRLVEELRDLIRELERKVKEVVETSRRLAEKDKEDNKRILEELRRLIRELEEDVR

SEQ ID NO: 14489 - protein, 60 aa, Artificial Sequence
  Synthetic
EEIERVEKLVEEVVRRAEDELRRSAEHVDRVVERAERLVERSREHSKDLMRRLEEVLRRG

SEQ ID NO: 14490 - protein, 59 aa, Artificial Sequence
  Synthetic
EDKAREIIERLRDVLRKIEEALERISRKLKEVLRRVEKKLEEDSRTLTRVVEEAKKKLD

SEQ ID NO: 14491 - protein, 60 aa, Artificial Sequence
  Synthetic
KEIEELDEEVRRLVEELKRLSDESRKHSKRLVEELKKLLEDSKRHSEELARRARKVLREG

SEQ ID NO: 14492 - protein, 59 aa, Artificial Sequence
  Synthetic
REDAERIIKKLEDVMKRAEETNRRDIKKLEDVLKDVEDKLREDSKRLREVLEEVKKRLE

SEQ ID NO: 14493 - protein, 59 aa, Artificial Sequence
  Synthetic
SEVEEILRDIERASEESKKTLDRILKKIEDASRRSKELSDKSLKEIRDAMEEIKKELDK

SEQ ID NO: 14494 - protein, 56 aa, Artificial Sequence
  Synthetic
SEELDRRVKELVRKSEEELKDLDREVKELVRRSEELLEDDKRLVKEVVDEARERRR

SEQ ID NO: 14495 - protein, 57 aa, Artificial Sequence
  Synthetic
DELEDVKRRVDEIVRELERLNEKLRRDVEEIVKRLKELNKRLLEEVRRTAEELKTKN

SEQ ID NO: 14496 - protein, 58 aa, Artificial Sequence
  Synthetic
EELREILKELKRVLDESRKLSKEIEEELERVLRDSERATEEILRELEKIIEEVERKVR

SEQ ID NO: 14497 - protein, 57 aa, Artificial Sequence
  Synthetic
DELEEVRKRVERIMEELKRHLEKIAKDSKKSVDELKKHLEDADRKSEESVRKLERDN

SEQ ID NO: 14498 - protein, 58 aa, Artificial Sequence
  Synthetic
RELEDILRRLEEVSERHRRSIEEILRRNEEASRRHRESIRRILEKNRRVLERVERKVE

SEQ ID NO: 14499 - protein, 60 aa, Artificial Sequence
  Synthetic
EEDERAKERVKRVVEENDKVNEDVEREVRKVVKENEDVLEEIKRTVDKIVEDLERLVREG

SEQ ID NO: 14500 - protein, 55 aa, Artificial Sequence
  Synthetic
ERILKELEDANEKSKKRSREILERLREANERIEETARRILKKLEEVLEEVERRTT

SEQ ID NO: 14501 - protein, 59 aa, Artificial Sequence
  Synthetic
KEREDVKREVEKSVEDLRRHVRDVEEKVRKIKKELEDHVRELKKRVEEIRRRLKDLADR

SEQ ID NO: 14502 - protein, 55 aa, Artificial Sequence
  Synthetic
ESVLEELKRANERHKREIERIRKELEDVSKEHEDRIRRVLEELERVLEEVKRRVD

SEQ ID NO: 14503 - protein, 60 aa, Artificial Sequence
  Synthetic
SEEERAKEEVEKHKRRLEKLVRDAERSSTEHERKLREIVERVKRELDKHEEKLRDIERKG

SEQ ID NO: 14504 - protein, 55 aa, Artificial Sequence
  Synthetic
EEVIREVEKISREVTKLLRDNLKRVEEVTERVERTLDELLERVKEVTKEVKERLR

SEQ ID NO: 14505 - protein, 60 aa, Artificial Sequence
  Synthetic
SERERAEELVRRHEDRLEKLVRELEESSDRHKKRLKRLVEEVRRLIEEHRRRLDEIKKEG

SEQ ID NO: 14506 - protein, 55 aa, Artificial Sequence
  Synthetic
EEVLRKVRTVSTEVKKRLDRNLEEVKKLTEDVTRKLRRLLEEVNKITRDVKREIK

SEQ ID NO: 14507 - protein, 57 aa, Artificial Sequence
  Synthetic
SELDEVRERLKRIVDDLRRRSEEVNKRLEEILREITERLREVNERLADIIRKIREDR

SEQ ID NO: 14508 - protein, 56 aa, Artificial Sequence
  Synthetic
EEVLKKLVEELRKRVEDMARTHDRLVEELKRKADEIVRRHEELVKDLKRKLEEVKT

SEQ ID NO: 14509 - protein, 59 aa, Artificial Sequence
  Synthetic
SEEEKAKELVKELRKEAKKIVDEMRKLVEDHAKLVEELVRDHKRLVDEHRRLIEELKDR

SEQ ID NO: 14510 - protein, 55 aa, Artificial Sequence
  Synthetic
EDVLRELEEIVRDIRKKIDDVIRKLEDISRKARKDSDDVNKRLNELTDDVRRKLT

SEQ ID NO: 14511 - protein, 59 aa, Artificial Sequence
  Synthetic
EEEERARDLVRRLEEIVRRLVKEHEDLVRRHKELVDKLVREHEKLLEDHRKLVEELKDR

SEQ ID NO: 14512 - protein, 55 aa, Artificial Sequence
  Synthetic
EEILERARKIVERLKTESDRVNKRLNEITRELEKRSDEVNTEVRRITKKVTEELK

SEQ ID NO: 14513 - protein, 59 aa, Artificial Sequence
  Synthetic
SEEERADKLVKELKKMAEDIKREMDKLVEELKRTIDELRKKHKELVDRHRRLVEELARR

SEQ ID NO: 14514 - protein, 55 aa, Artificial Sequence
  Synthetic
EEVLKTLKEIVRKIEEEIDRVEKRLRELVKELKDDSDEVNKEVNKITRKVKEELR

SEQ ID NO: 14515 - protein, 56 aa, Artificial Sequence
  Synthetic
RTEEEAERTVEDVARKVKEWREELEEVVKEVRERVKRWKEEMRKLDEDTKKKLDDA

SEQ ID NO: 14516 - protein, 55 aa, Artificial Sequence
  Synthetic
EEVIERIERILKDLHRDSERVLRELKRILDELHRESKESNERNKKLVEDAERRTK

SEQ ID NO: 14517 - protein, 56 aa, Artificial Sequence
  Synthetic
DTEKDAKRTVDDVRRKIREWEERLKKIVEEVKELVRELVERAKRLDEETEREAREA

SEQ ID NO: 14518 - protein, 55 aa, Artificial Sequence
  Synthetic
EEVIKELEDLLRRLHEESKRVLDTLRRILEELRDRVRRSNKRNEEIVKELEDRSR

SEQ ID NO: 14519 - protein, 56 aa, Artificial Sequence
  Synthetic
SEEDKAREVLKRVRDEVEKWRKELERLDEESKKKVDDLVRELEELDKKTDEELRRM

SEQ ID NO: 14520 - protein, 55 aa, Artificial Sequence
  Synthetic
EEILKKIRRILEKLHEDSRRSNETNRRILEELEKRVRESNKRNEDILREVKRKAK

SEQ ID NO: 14521 - protein, 56 aa, Artificial Sequence
  Synthetic
KTEEKVERDVERVKRDVDELIRRAEEVVKRVEDEVRKWIKELKELDDETERLVREA

SEQ ID NO: 14522 - protein, 55 aa, Artificial Sequence
  Synthetic
EEVIKRIKKILDDVRRAVKEVLDRIRRILEKVHEDSRRSNKRNKEILDKVREDTR

SEQ ID NO: 14523 - protein, 56 aa, Artificial Sequence
  Synthetic
SDEERVKEELKRILDEARRLLEESDEKLKRILDELRERLKESDERLKRILDKVRKD

SEQ ID NO: 14524 - protein, 56 aa, Artificial Sequence
  Synthetic
SEELEKEVRELKKRLKKLIDESDKNVKEAEKELRELLRRSEEHVKELKKDADRESK

SEQ ID NO: 14525 - protein, 56 aa, Artificial Sequence
  Synthetic
DDERRVKEKLKRILDESRDMLRRSDERVERSVRTLEDALRRSDEKLERILKKAEDD

SEQ ID NO: 14526 - protein, 56 aa, Artificial Sequence
  Synthetic
SKELDDAVKKNKKESKETVDRSEKNVKELHDRNEELLRRSEKNVDDAKRRLDDTSR

SEQ ID NO: 14527 - protein, 56 aa, Artificial Sequence
  Synthetic
DDEERVKKALDEILDRSRRRLEESDEKLDRSLKTLKKLLEESDRDLERILEKAERD

SEQ ID NO: 14528 - protein, 56 aa, Artificial Sequence
  Synthetic
REELEEAVRRNDEESKKTVDDSRRHVDELHRRNEKLIEESKDHVRRLEEELRKKSK

SEQ ID NO: 14529 - protein, 57 aa, Artificial Sequence
  Synthetic
DEKEELSERVERVIRTAEKLLDEIKRKLEEIHKKANEDLERSLRKLEKVVKEVRDAG

SEQ ID NO: 14530 - protein, 56 aa, Artificial Sequence
  Synthetic
EDELREDVERVKRRLEELIERLRKKVDEVKERHERMLKRSEEHVKELKDEVTEEAK

SEQ ID NO: 14531 - protein, 59 aa, Artificial Sequence
  Synthetic
SEKEELEKEVEDLERRHREELEKLNRKSKKIDEDLKRIIEELNKVSKKIKEDLEREIRK

SEQ ID NO: 14532 - protein, 55 aa, Artificial Sequence
  Synthetic
DEVRKRVEDINREVKEMLERNLRHTEEVIKKADREIEKNERHTREVIREAEERLR

SEQ ID NO: 14533 - protein, 57 aa, Artificial Sequence
  Synthetic
SEVEEVDKKLETSHRDIEKRIREVLRELEESSRKLKRDVDEVLKKLEESHRRIAESL

SEQ ID NO: 14534 - protein, 56 aa, Artificial Sequence
  Synthetic
SKRLEELVKEHKRTLEEVKRRLEELVKKHRKDLEDLVREAEELVERHKRKLDETEK

SEQ ID NO: 14535 - protein, 57 aa, Artificial Sequence
  Synthetic
SEVEEVDKEVERILDEARKALKRVEERVRKSHEDIRREIKRVEEDLERSSREIREKL

SEQ ID NO: 14536 - protein, 56 aa, Artificial Sequence
  Synthetic
AEKLKKLVEELEKEIRRLVDELDKLVRKHEEELDRLRKRMDELVKEHKKRLDDTAK

SEQ ID NO: 14537 - protein, 63 aa, Artificial Sequence
  Synthetic
DDEERAKKRVKEAEKEIKDLAKESRDIVEKHRKEVEDVVREMERIVRELAEEAKDVVRKVKDD

SEQ ID NO: 14538 - protein, 54 aa, Artificial Sequence
  Synthetic
EVKDRLRDVLKKAEEMSKEVEDRLRKSSEDLREEVERVEEELKRVLRKIEEDIR

SEQ ID NO: 14539 - protein, 63 aa, Artificial Sequence
  Synthetic
DDRERAKKTVDKVKEDLTRLVRRSEDLVRRHTEKLERVVEELERIVKELEERLKKVVDDVKDR

SEQ ID NO: 14540 - protein, 54 aa, Artificial Sequence
  Synthetic
DVKRTLREILRELEEASREVEERLKESDDRIRERVREVDEKLDRVLEELRKKMT

SEQ ID NO: 14541 - protein, 56 aa, Artificial Sequence
  Synthetic
DELEKVRKELKEILDKLKDVLEESRERTDRLLRKAEEDLRRSDEETERLVKELKDA

SEQ ID NO: 14542 - protein, 56 aa, Artificial Sequence
  Synthetic
KDELKKLVEDLDREVRKIVEELKELNKRIEDELRRIVDEARRSNEKVKELIDRLRK

SEQ ID NO: 14543 - protein, 56 aa, Artificial Sequence
  Synthetic
DEVETVEREADRILKEDEDVLRRSKKITEDILDTLREMLERSERRTEEILKRLEED

SEQ ID NO: 14544 - protein, 56 aa, Artificial Sequence
  Synthetic
KDELKKLVDELKERSKETERELKESNDRLRKKVEDIRRELKRLNDEAEEAVRRLRT

SEQ ID NO: 14545 - protein, 56 aa, Artificial Sequence
  Synthetic
SLIERIEEEIRRVIERVRRLVREIEDSDRKAKEDLERVVREDEETLRRVEKKLKDL

SEQ ID NO: 14546 - protein, 59 aa, Artificial Sequence
  Synthetic
EEEVKKLLEKVKRTARELEKVAEDMLRSNRELVKELLRTLEKSLRDSERTAEKLERAEK

SEQ ID NO: 14547 - protein, 56 aa, Artificial Sequence
  Synthetic
DKEKEISDRLKDVLRKVRDVIEKDKRTNEEARKRVEDLVRKDEETLKRVLEEVRKG

SEQ ID NO: 14548 - protein, 56 aa, Artificial Sequence
  Synthetic
LEDLLRKVEKLAREITERLKESNERSRDLVEKLKREVKKSLRKSERLMEKARETLR

SEQ ID NO: 14549 - protein, 56 aa, Artificial Sequence
  Synthetic
SEREEVKRTLTKAEEEARRLIKRDRDTNTEILKEATERSERDKDKLRKILEEVKKA

SEQ ID NO: 14550 - protein, 55 aa, Artificial Sequence
  Synthetic
KDILDRVRRLVEELRRMIEELNDKSRKLVERLRKLLEDLNRHLEELVKRLRDKAK

SEQ ID NO: 14551 - protein, 56 aa, Artificial Sequence
  Synthetic
SAKEELEDRIRDIVRRVRELITEVKKKNREILKRVEKVIKEVKETNERIEEEVRRG

SEQ ID NO: 14552 - protein, 56 aa, Artificial Sequence
  Synthetic
IDKARKEVEDLVRDAKRVIEELERSLDELVRTLDELVRRLKKSSEDLMRELRKTTE

SEQ ID NO: 14553 - protein, 56 aa, Artificial Sequence
  Synthetic
DEKKEVEKRLKEIEDEVRKMIKEVKETNRRILKKARDLIKKVEDTNKRILEEVRRG

SEQ ID NO: 14554 - protein, 56 aa, Artificial Sequence
  Synthetic
IKKLEDEVRKLKDELRRELERLKRSSTDLARRLEEIIRRLERSSEDLERRLRERER

SEQ ID NO: 14555 - protein, 56 aa, Artificial Sequence
  Synthetic
DEKEEVRKRLTDILRELEDLSRENERSNRRILDRVRELIERVKKTNKDILEEVERG

SEQ ID NO: 14556 - protein, 56 aa, Artificial Sequence
  Synthetic
IDKLRREVEELVRDLRRLIEELSRSSEELVKELEKLLRELEESSKKLAEELRKAVE

SEQ ID NO: 14557 - protein, 60 aa, Artificial Sequence
  Synthetic
SSKERIKEKVDRIEERIREVVKEVEEELRRSTEEARRMVREVKRRLEDSNRKIKKFIDEK

SEQ ID NO: 14558 - protein, 56 aa, Artificial Sequence
  Synthetic
SEELKRLLEDLRRKIEELAKELKKLLEEHKRRVDDVVRRMEELLKRHEELVRRIAK

SEQ ID NO: 14559 - protein, 58 aa, Artificial Sequence
  Synthetic
SEAEEAKKTVEEISERLREALRRSEEETERILRENEKASERHKTEIEKITKELEDKLG

SEQ ID NO: 14560 - protein, 56 aa, Artificial Sequence
  Synthetic
KDELKKVLKEIEDTVRRIVKELEDLNTEAEKASRKSVKELEEHLKRVEERVREEAK

SEQ ID NO: 14561 - protein, 59 aa, Artificial Sequence
  Synthetic
ELKERLEKLLKDWADDSKRMRDELARLLKEWEDRSRKAKRDLEKILEENDDKVKKLDKV

SEQ ID NO: 14562 - protein, 59 aa, Artificial Sequence
  Synthetic
EKVLREVKESAKKISRHSEKVLDEARKELERISEHSRRVLDRVRRESKKIVEDLRERKR

SEQ ID NO: 14563 - protein, 60 aa, Artificial Sequence
  Synthetic
DIERELEEIVRRIKELIRRHKKRLEELVRELEELLRRHREELKKLVKRAAELVEELRRRN

SEQ ID NO: 14564 - protein, 55 aa, Artificial Sequence
  Synthetic
DTVKDMLRKLLEEVKEASDRAREKLTDILRKIKKISEEVKREIDDIRKKIEDTAK

SEQ ID NO: 14565 - protein, 60 aa, Artificial Sequence
  Synthetic
SIEEEAARIVEELRREVEEWERTLREIVERLRRLVEEHKRRLDELVAELKRLVDELRKEN

SEQ ID NO: 14566 - protein, 54 aa, Artificial Sequence
  Synthetic
DIRRKLKEILDELDTITEKLKKELERIKREMKEASRRVREKIDRIRKEIEEVAR

SEQ ID NO: 14567 - protein, 56 aa, Artificial Sequence
  Synthetic
DEIRELLKRIRDVAKRIKDKADRLNEKSRRKVEKLVRDVEKINEDTKRLLDRLRDS

SEQ ID NO: 14568 - protein, 59 aa, Artificial Sequence
  Synthetic
EDVLRELERLLKEIEDLVRELNKTNKKIVDKARKDVKDVHRTNERLLREIERVVREKLK

SEQ ID NO: 14569 - protein, 56 aa, Artificial Sequence
  Synthetic
SEAEELLRRLEKIIEDLERNARALLEKLKEEIRRLDKNLRDLLRRIEKIMRDLTRS

SEQ ID NO: 14570 - protein, 59 aa, Artificial Sequence
  Synthetic
EEVLKEIKRVLEEAEKVSEDLLREIKEVLDRAEELSRRLLKTLEDLLRDIERSVKERED

SEQ ID NO: 14571 - protein, 57 aa, Artificial Sequence
  Synthetic
SSKEKVEELVKEIEEEDRRVLEDTRRLLEEIMRRDEDVLRKTDERIKEIEKELRDRV

SEQ ID NO: 14572 - protein, 56 aa, Artificial Sequence
  Synthetic
SKEAEDRLRDLVRRSREIAKRSRDHLRDLLRESEERVRASLEHVERLVKKLRKDAN

SEQ ID NO: 14573 - protein, 56 aa, Artificial Sequence
  Synthetic
SEAEDLLRRLEEEIRRIKKRHKEVLDELRKLIKEVEDRHKELLDRLREEIRELEER

SEQ ID NO: 14574 - protein, 59 aa, Artificial Sequence
  Synthetic
DRVKEELRRIVKEVRDEIRKANEKIKRLLDEVRERSKDMNRRLKEIVDRVTESLRRKAE

SEQ ID NO: 14575 - protein, 61 aa, Artificial Sequence
  Synthetic
SEVDEALERIKRLIEDLERHVREWLKELREIIEDLRERVRKLLEDLERRIKELEEKARRTG

SEQ ID NO: 14576 - protein, 59 aa, Artificial Sequence
  Synthetic
SKAVEDLERLVEELRKLSEEASRRSRKILEELRETVERVIKRLKELLKKLKEVVDELRR

SEQ ID NO: 14577 - protein, 61 aa, Artificial Sequence
  Synthetic
DRAEKVLEDIRKLIEEMRKHAEEWERRAREAVKELRKEVTDWRRRLRKLLEDLEEKVRREG

SEQ ID NO: 14578 - protein, 59 aa, Artificial Sequence
  Synthetic
SEVVRRLEKLVEDLRKINEDVNRRSRELVETLRDDVRKVNEESKRILEEVKKILDDSKR

SEQ ID NO: 14579 - protein, 59 aa, Artificial Sequence
  Synthetic
DLRRELRRVLEESKKHVKELVRELDEDLTRWERRVEELVKRLRDVLRKLEKEVDELEKK

SEQ ID NO: 14580 - protein, 58 aa, Artificial Sequence
  Synthetic
RVKEELRELVRESDKIAEEIIEKLDRDVKKVKKDHERIDEELKRKLKEVEERVERIRT

SEQ ID NO: 14581 - protein, 61 aa, Artificial Sequence
  Synthetic
SEVEETLREIKEDIKRSKKEWDDLLKTIKELIEDSKRKWDKLLRDVEELIRELLERLRRDG

SEQ ID NO: 14582 - protein, 59 aa, Artificial Sequence
  Synthetic
DRAERDVERIIREAKKLTDKVREDVERLREEWERLVREVKERIKRLLEDLRRLVEETRR

SEQ ID NO: 14583 - protein, 61 aa, Artificial Sequence
  Synthetic
DEAERLLEEAERIIEKSREEWERLLERIKRLIETLRKRYEDDLRESEKRIEELLRKARRDG

SEQ ID NO: 14584 - protein, 59 aa, Artificial Sequence
  Synthetic
DRVAREVERILRELKKLTDDMKKRAKELIDELKRLSEEMHRRIEKSNEDLKRLVDDVDR

SEQ ID NO: 14585 - protein, 61 aa, Artificial Sequence
  Synthetic
DEAEDILRRIRELIERSKRKWDELLREIKKLIEESRREWEELLRRIREIIERLKRLAERDV

SEQ ID NO: 14586 - protein, 59 aa, Artificial Sequence
  Synthetic
ERVKEEMKRLIEDLKRVSEEVKRELDKLIEELKEVSERASKRLKELIDDLDRLVKEVEK

SEQ ID NO: 14587 - protein, 59 aa, Artificial Sequence
  Synthetic
SEDEKAIEELKKEIERLRRLLEELRKHVRRLIEEIKRLVEESKRHVEELIREIDDLRRR

SEQ ID NO: 14588 - protein, 55 aa, Artificial Sequence
  Synthetic
KEVTDIIRELKEVLDEIKRTSEELLRTIEEIVRDAERKNRELLKELKKVLDEVEK

SEQ ID NO: 14589 - protein, 58 aa, Artificial Sequence
  Synthetic
DEDEELIKRLRDRIREIRKLVEDSARNVKRLIDEDERLARRSLRHLEETLKEIERKAR

SEQ ID NO: 14590 - protein, 55 aa, Artificial Sequence
  Synthetic
DEVREVLKEIRELVKELKERNDELLTRWKESIKRVEEEDERILREIERRVEEVER

SEQ ID NO: 14591 - protein, 60 aa, Artificial Sequence
  Synthetic
RAEEEVKRLLKEDNETLKRIEDDVRRLLRKNNESIREAEKTNRELVKRVEDIIRRARERG

SEQ ID NO: 14592 - protein, 56 aa, Artificial Sequence
  Synthetic
LEELLERIKELNERTKKKVADLRRVAKRLDEETERKVRETERRWRDVLDKVRKKVK

SEQ ID NO: 14593 - protein, 55 aa, Artificial Sequence
  Synthetic
REVEEVLERLKELLREHEKHAKEVEDRLRELIRENKEHAREMLERLEKILDELKK

SEQ ID NO: 14594 - protein, 59 aa, Artificial Sequence
  Synthetic
EEALRELRRLLDEIRRVNRKVEERIKEVLKKIDEDNKEVVRRLEEALEKIREVIERTAT

SEQ ID NO: 14595 - protein, 59 aa, Artificial Sequence
  Synthetic
KAKEDVKRALDEWKEVNDRVNEELKKAIDTWREVNRKVKEDVDRLVKEIEELIRRVREN

SEQ ID NO: 14596 - protein, 56 aa, Artificial Sequence
  Synthetic
REDVKRELKRVIEETRERAKRLLEDLRRLIEETKKLAEELLARAKEIIDRIREAAR

SEQ ID NO: 14597 - protein, 61 aa, Artificial Sequence
  Synthetic
RAEEELDRLSREVEKVSKKAREDLEEMRKALEDVSRRVKEKLRRILEEIKEAIKDVKRRTN

SEQ ID NO: 14598 - protein, 56 aa, Artificial Sequence
  Synthetic
RELIREVEKLIEDHRRRLEEIVETVRRLVDEHRRRLERIVREAAKLVKDIKRELEK

SEQ ID NO: 14599 - protein, 61 aa, Artificial Sequence
  Synthetic
SVKEKLRRISKELEKASRDDERENRRILKEARDVIREAADKIRRIEEELRKIIDRVRKETN

SEQ ID NO: 14600 - protein, 56 aa, Artificial Sequence
  Synthetic
EEIIEEVKRLVDEHKKRLDENVKRLKELVDRLRETLERLVDRLRKLVETLKRESDR

SEQ ID NO: 14601 - protein, 61 aa, Artificial Sequence
  Synthetic
KVEEDLKRIKKEIKDAADEDREKNREIMKRLNDVTREVEERLRKILEDLERLVRRVKEEVN

SEQ ID NO: 14602 - protein, 56 aa, Artificial Sequence
  Synthetic
EELIKRVKELVREAKERLKDNVRRLEELVKEWKRKLKEIVDRVRELVKDLERRLKE

SEQ ID NO: 14603 - protein, 61 aa, Artificial Sequence
  Synthetic
SEKEKIVKDVEELIREAEELVRRLLKRLKELNDESEKTARDLVRKNEETLKELKDVVDRRV

SEQ ID NO: 14604 - protein, 55 aa, Artificial Sequence
  Synthetic
RELDELIKKLDEVLRRAEKEAEELIRDHRRISREVKERIKDLNRRIERILREAEK

SEQ ID NO: 14605 - protein, 61 aa, Artificial Sequence
  Synthetic
SLEEIVKRVEEDIRRIIEELRRRIEEADRKIAEIIDRLRKTVEKVNKEIEDLIRELKKKEG

SEQ ID NO: 14606 - protein, 56 aa, Artificial Sequence
  Synthetic
DKRVRELVEEVKKKLRDLVEEVRESVKRLEDTLRRVEEEIRTTARELLRRLREELE

SEQ ID NO: 14607 - protein, 59 aa, Artificial Sequence
  Synthetic
SLEEEVRETVKRLRKEVEDWLREVEKVLEDLLRELKKSIEETKKVAKELEDKLRDVKRR

SEQ ID NO: 14608 - protein, 59 aa, Artificial Sequence
  Synthetic
ERIRRTLEKAREEVKRLSAETKRLIEEVKRRLDELLKRDNDIIDDARRRVKKVLDEIET

SEQ ID NO: 14609 - protein, 59 aa, Artificial Sequence
  Synthetic
DLEEELRKVVEDLERKLRESIRETEEVMRRLEESVEESIRKTEEVVKRLREKLEDVKRR

SEQ ID NO: 14610 - protein, 59 aa, Artificial Sequence
  Synthetic
DEIRDTVRKAKEDVERLLEEDNRRIKEVLDRVAKLNKRDNETIERAEEEARKVLREIEK

SEQ ID NO: 14611 - protein, 59 aa, Artificial Sequence
  Synthetic
DIEEEIREEVERLRRTLKELADRIKKLVDELREKLRRWLEEVEEVLRRLIEDLRRVKEE

SEQ ID NO: 14612 - protein, 59 aa, Artificial Sequence
  Synthetic
EELEKRVREAEEEVRRVNKKLKDDLDKAREDLKEFSDRTRRMIKAVERDVKRVLDEIRR

SEQ ID NO: 14613 - protein, 58 aa, Artificial Sequence
  Synthetic
SVEETIKRILEEVEELIREVKERNERIERRAERLIEEVKRSNDEIKKEVRTAIEKVIR

SEQ ID NO: 14614 - protein, 56 aa, Artificial Sequence
  Synthetic
KEKVDKLVKDLRRVIEELRKSLEDLERRLDDILRRLKESSDELVRELRRLLKEMEK

SEQ ID NO: 14615 - protein, 60 aa, Artificial Sequence
  Synthetic
SVEEALDEIEKKVEEMIREVKETNDRVRRKVKELSEKSKTENERVVREARELIREVERER

SEQ ID NO: 14616 - protein, 56 aa, Artificial Sequence
  Synthetic
KKDVDDLDRDLEKKLRDLKDSSRKLVKRVEDLVRESEDTVRKLIERLERLIRETKR

SEQ ID NO: 14617 - protein, 58 aa, Artificial Sequence
  Synthetic
KVEEELDKILKEVEDLVRRDEEEIKRILEEVKELIRKVKETNDKVEREMRKLVEEVKK

SEQ ID NO: 14618 - protein, 56 aa, Artificial Sequence
  Synthetic
EDSVRELVKRLRERAEESKKRTKDLEDKIRTKIEELERSSKELTDELRTLIREAER

SEQ ID NO: 14619 - protein, 59 aa, Artificial Sequence
  Synthetic
SVEEAIKEILRELEKVNEDSKRLSDRNLKELEKALRDAKKSVEEILRELEKALDEVRKN

SEQ ID NO: 14620 - protein, 60 aa, Artificial Sequence
  Synthetic
REDVERILKEIKDEVDRVRKENERVNRESEDESRKLVEELKKVLRRLKEEVRRIVEELRT

SEQ ID NO: 14621 - protein, 61 aa, Artificial Sequence
  Synthetic
EVEERLEEILRRLERAVEDWKRKNEKILKELRDVVRESKKRTREIEKKIEDAARDVLREVN

SEQ ID NO: 14622 - protein, 56 aa, Artificial Sequence
  Synthetic
KEVVKELEKDVRRIVEELKDSLRRLKEKVEEVARTVKKLNEELDDSVREIVERLRK

SEQ ID NO: 14623 - protein, 61 aa, Artificial Sequence
  Synthetic
NVEEELDRIRREAEKVVKESRELTREILERAREAVEKSEEDTRRILERLERVVKRVKKDVN

SEQ ID NO: 14624 - protein, 56 aa, Artificial Sequence
  Synthetic
EEVLDELRKKVKKLVDELRTEDRRLEEEVKKIVRDAEKRNKELEDEIRRLAEELEK

SEQ ID NO: 14625 - protein, 60 aa, Artificial Sequence
  Synthetic
SETETAVKKLKKLVDDLKREVERLVERLRELVRENSEKSRELVKRSDDLVRELLEKVKRR

SEQ ID NO: 14626 - protein, 56 aa, Artificial Sequence
  Synthetic
SELVKTVEEELKKVLEEVDRLVRKILEDLRRSLEESKRLSEESKKKLEDVLDRARR

SEQ ID NO: 14627 - protein, 60 aa, Artificial Sequence
  Synthetic
RELEEAVKKLKKKVEDNTRTSRKLVTDLEREVEELKKEVEEVVRKSKELVRELKKKVDRR

SEQ ID NO: 14628 - protein, 56 aa, Artificial Sequence
  Synthetic
SELVERVKEELKRSLEESDKLVEDVRRKLKEVLDDIRRLSEESKRELRDVLREADK

SEQ ID NO: 14629 - protein, 60 aa, Artificial Sequence
  Synthetic
ELEEIVKDARRRIKELIDEARRTSEEVVERIKELLKRAEEISREARKRLTELLEELKKTV

SEQ ID NO: 14630 - protein, 56 aa, Artificial Sequence
  Synthetic
KEELRKIVEDILRTIKKLLEELRDDARRLLEEIKRLLEELERHVRKLLKEIDERIK

SEQ ID NO: 14631 - protein, 60 aa, Artificial Sequence
  Synthetic
ELEEIARKAKEDIERLVEEARRISEEVKRELTELVERLRRISEEVRKRIEDLADELRKKV

SEQ ID NO: 14632 - protein, 56 aa, Artificial Sequence
  Synthetic
KKTLKEKVEDILRRIRELLRELRENARELVKEIERLIRELEKDAKRILKKIEDAIR

SEQ ID NO: 14633 - protein, 60 aa, Artificial Sequence
  Synthetic
SVEELVKEIEKRLDELVREIEKTNKKVEDDIRKMLEDIKRVHDKSNEDLEKLVKELREKL

SEQ ID NO: 14634 - protein, 56 aa, Artificial Sequence
  Synthetic
LKDIEKVARDILRRVKKILEENRKHAEKARRELEKLLRESKRLVDELLRRAEEEKR

SEQ ID NO: 14635 - protein, 60 aa, Artificial Sequence
  Synthetic
SREDRARELVKRILDEHKKILEDVEELAKELLRRHEELLKTLRELMRRIEEDLKRLEDED

SEQ ID NO: 14636 - protein, 56 aa, Artificial Sequence
  Synthetic
SEILKTVTRLSEELNRRIREVVRKVEEDLEDLNRRLKKIADEIEERIKEILRRIEK

SEQ ID NO: 14637 - protein, 60 aa, Artificial Sequence
  Synthetic
SIEDVVRRIREEDRRLHEEIRKVVDEIRKRLEDALRSHEERVREVLERIKKLLEELKRRG

SEQ ID NO: 14638 - protein, 56 aa, Artificial Sequence
  Synthetic
EKDLRKKLREIEEKNERLLRELERLLEEIRRTLEDLNRKLDEEIKKLERRLKERDR

SEQ ID NO: 14639 - protein, 58 aa, Artificial Sequence
  Synthetic
SLKELIDEVERRLREVNRRARELVEEVKERLRRVNEESRELLREIEERLEDVLRELEE

SEQ ID NO: 14640 - protein, 59 aa, Artificial Sequence
  Synthetic
EEEIKELVKRARELVKRSKEHVDELMETAKRLVDESRKHAEELFRELKKLIEELREKIR

SEQ ID NO: 14641 - protein, 60 aa, Artificial Sequence
  Synthetic
SEVEKLVEDLRREVKRHSEKVERLVKELRDDLERWKERLEEIMRRLEKLVRDLEELLRRG

SEQ ID NO: 14642 - protein, 56 aa, Artificial Sequence
  Synthetic
EELVREVKERLERSRERVDKLLRDNHKRLKEVLDEAKKLIDRVRKLLRRVLEEAKK

SEQ ID NO: 14643 - protein, 60 aa, Artificial Sequence
  Synthetic
SDVERLITELADSVRDHSRDVRRVVEELEKLLRDWERDIEDIVEKLDRLVRTLEELLRRG

SEQ ID NO: 14644 - protein, 56 aa, Artificial Sequence
  Synthetic
EDLVRTVEKLNTESLDEVRKLVKKNHEDLKRVLDKAKKLIEEVRKKLEEVLDEARK

SEQ ID NO: 14645 - protein, 59 aa, Artificial Sequence
  Synthetic
TLEEILKEVAERVKKANEDSRRILEKVKRDVETVNRENEKILKKAAEDVKRVLDEARKR

SEQ ID NO: 14646 - protein, 56 aa, Artificial Sequence
  Synthetic
EKELREMIEKLKRDNERMLRELERRIEELKRDNDRVNEESKRLVDELKRDAEEKLK

SEQ ID NO: 14647 - protein, 59 aa, Artificial Sequence
  Synthetic
TLEEILREVEKRVKEANERNRKISEELADLVRRVNEENKKILEDVAEEVRRALERARRR

SEQ ID NO: 14648 - protein, 56 aa, Artificial Sequence
  Synthetic
EEELRRMIEELEKRNRDVDRESKKLAEELEKTNRDVNRKSRELVRRLRRKLEEELR

SEQ ID NO: 14649 - protein, 59 aa, Artificial Sequence
  Synthetic
ELEDILREVRKRVEDVNRRNKEILERVAEEVRRLNEENKRILEEARKRVEKVLEDLKRR

SEQ ID NO: 14650 - protein, 56 aa, Artificial Sequence
  Synthetic
EEELRRAIKELKDRNEDVDRRTKELIKRLEDKNRELNRESRERVEELKKRAEELAR

SEQ ID NO: 14651 - protein, 59 aa, Artificial Sequence
  Synthetic
DLEEILKDVKRRVEEANRRNEKILEEAKEKVDRVNRSNEKILEEVKETVKEVLRRAREE

SEQ ID NO: 14652 - protein, 56 aa, Artificial Sequence
  Synthetic
EEELKEMIRRLEETNRRVDKETRKLIEELERRNREVDRESERLIRELKKKAKDDLD

SEQ ID NO: 14653 - protein, 59 aa, Artificial Sequence
  Synthetic
TLEDILREIAKVVKEANKRNKRILEKVARDVEEVNKENKKILDEVKRDVERVLREAEKR

SEQ ID NO: 14654 - protein, 56 aa, Artificial Sequence
  Synthetic
EDELRRMLEELERTLREVDRESDELVKKLKRDAERVNEETRRLIKELKEIADRLLD

SEQ ID NO: 14655 - protein, 60 aa, Artificial Sequence
  Synthetic
SIEELVREIEKTNEDMRREIERLSDENRRRLDKALEDIERRAREIKEKLERVMKRLREKG

SEQ ID NO: 14656 - protein, 60 aa, Artificial Sequence
  Synthetic
EKRVLDELRKLLEDSKDELRRLLEELRRHIKETDDTVRELLDRIRKIREELDDEVRRLEK

SEQ ID NO: 14657 - protein, 60 aa, Artificial Sequence
  Synthetic
KEEEDARRALKRVEEEVRRNKEEMRKLLEDNEKRIRENKKRAEDSSRKVKKRIDELRRDG

SEQ ID NO: 14658 - protein, 55 aa, Artificial Sequence
  Synthetic
EEVLREIEKILRDLERDHRRVLEEIRKRNDELRETHERVLRENEKILEKVERELR

SEQ ID NO: 14659 - protein, 56 aa, Artificial Sequence
  Synthetic
SVDDKVRRRIREIKEELERVLTRSERESDDIKRELEEVLKRSEERTKKIKDDAERG

SEQ ID NO: 14660 - protein, 60 aa, Artificial Sequence
  Synthetic
DERVMRDLERELEKLERKVREIKRELEEHNARLREKVRRIDEDLKRDNKELEDTIREDTR

SEQ ID NO: 14661 - protein, 59 aa, Artificial Sequence
  Synthetic
KEEEELEERIRRLEKLVEDYKRELDRSIKELEDEVDRARRELEKSIEEMKKKVKKAEDD

SEQ ID NO: 14662 - protein, 59 aa, Artificial Sequence
  Synthetic
DRVIRKIKKLLDEVRERLERINRTHRELLKEVEERLKKILKDITDANRRIEERLEEITR

SEQ ID NO: 14663 - protein, 60 aa, Artificial Sequence
  Synthetic
SLKEELKRINDENKEELDRLREELKKLLKEVEEELRRAAEELERINRRIKEELDKVADRV

SEQ ID NO: 14664 - protein, 59 aa, Artificial Sequence
  Synthetic
EEVAERLLEELREDVKRTKEKMKEMLDRVKKKIDDIKRKLEKLLRDNERRIEELKRDAD

SEQ ID NO: 14665 - protein, 58 aa, Artificial Sequence
  Synthetic
SVEEKLKKALEESKRKSKRIKDDDERANREVKKRIEDIVRRLEEVLRKVLKDVTKDIK

SEQ ID NO: 14666 - protein, 56 aa, Artificial Sequence
  Synthetic
EDEVTRDVKRLEDHNTRLEKKVKESVERLKEKLEELRKRVEKIERDLEKLLEDVRT

SEQ ID NO: 14667 - protein, 60 aa, Artificial Sequence
  Synthetic
KAEDVLRRVKEEHERIRREIKRVIDDVRRKHKEILDRLREEIKRVEELLRKILEDVERDG

SEQ ID NO: 14668 - protein, 56 aa, Artificial Sequence
  Synthetic
EEVVKELEDNVKRNEEDAKRTVEKLRKNLEDNRREVEKIVRDLRRLVEKAREDVKR

SEQ ID NO: 14669 - protein, 56 aa, Artificial Sequence
  Synthetic
DLKEILDEARKLIEDLRKKAEEILEESKRLLDDLKRKADEILTRYDELTKRLSTKV

SEQ ID NO: 14670 - protein, 56 aa, Artificial Sequence
  Synthetic
LEELKKRLEELIREVEKDLRRIKKESEDRVEEIERRLRRIAEELDKDVRRVEEEAK

SEQ ID NO: 14671 - protein, 63 aa, Artificial Sequence
  Synthetic
SKEETVARRVDEIARELEEKNKKWEDDSRKAVDELRRKLEEWEKRSRDLREKVKDLLRKLKDQ

SEQ ID NO: 14672 - protein, 55 aa, Artificial Sequence
  Synthetic
EELKKKVEKLLEDHRKKSEELLRKDEKLIRDMEREVERLLREDEKVIEDVERATK

SEQ ID NO: 14673 - protein, 63 aa, Artificial Sequence
  Synthetic
SKEETVERDVERIVRRLRELNKEWKKRSEEVKREVDESDKRTAEAVKKLVRDLEETLKDLKDR

SEQ ID NO: 14674 - protein, 55 aa, Artificial Sequence
  Synthetic
EEIKKKLEKLLKEHEDLSRKLLKEDEEEIDRHRRKVREWAEDLRKKLEEAERAST

SEQ ID NO: 14675 - protein, 60 aa, Artificial Sequence
  Synthetic
SEKERAEEELKRIEDELREAIKRSEDRLRRIEKELRDREKRSEEELRRLEEELRRLAEER

SEQ ID NO: 14676 - protein, 55 aa, Artificial Sequence
  Synthetic
RKIIEDLKRLLREFERAVEESNERLRRLLEEFKEKVKESNKRSRELLRRMEEEVR

SEQ ID NO: 14677 - protein, 57 aa, Artificial Sequence
  Synthetic
DDLERLEKEAREILERHKRALDELEKRLRRVLEKHEEDLRRLEETLRELLKKVRKDG

SEQ ID NO: 14678 - protein, 56 aa, Artificial Sequence
  Synthetic
REELEKEVRKLEKKSRDDIRRLEKELRELEKRSRDNIRELEKRVRRVARELDKTAK

SEQ ID NO: 14679 - protein, 59 aa, Artificial Sequence
  Synthetic
DEKEEAEKALREIKKRIEDNVREVRRLNRELREKLRKLIEDYDRLLKELEKRVEDIVRK

SEQ ID NO: 14680 - protein, 56 aa, Artificial Sequence
  Synthetic
ERDLRREEKKLRDELRDLHREHRKSIEDLDREIKKMEDELRRSIEENRKRVEELEK

SEQ ID NO: 14681 - protein, 56 aa, Artificial Sequence
  Synthetic
REKERVKRVVRRVEEELKRNLEEVEEESRRDLRRLEENLERVEEAVRRILKRLDDS

SEQ ID NO: 14682 - protein, 56 aa, Artificial Sequence
  Synthetic
REELEKLIEKIERELKKTHDDSRREIERLRRETKKLHEKSEELIRELEKRLRDAER

SEQ ID NO: 14683 - protein, 60 aa, Artificial Sequence
  Synthetic
SEVEEILDRIRRELERLAREARKTVERNKKELDRIREEVDRSLRRNKEELDRLRREKKDV

SEQ ID NO: 14684 - protein, 59 aa, Artificial Sequence
  Synthetic
EDARRAARELLKRLEDLLREHHDRLRKSDEEIRKLIEDHHRALEESNREIKELIDRMAK

SEQ ID NO: 14685 - protein, 60 aa, Artificial Sequence
  Synthetic
DEAEKLIKDIEDKDEELKEKARELKEKLEERDERTKKLIEELKREADRTLEELKKKVEKA

SEQ ID NO: 14686 - protein, 58 aa, Artificial Sequence
  Synthetic
EVVKRVRDLLKRHEDLTREIKKEVKKMNEKNRELVRRVEETLKKLLEDLKRLLDESRK

SEQ ID NO: 14687 - protein, 60 aa, Artificial Sequence
  Synthetic
SEEEEKVKDIERKLRKHNKEVKDTERENEKRLRELRRTVEEDRKDAERELERIKRVVERG

SEQ ID NO: 14688 - protein, 55 aa, Artificial Sequence
  Synthetic
EELDRLEKELRESIRRAEELLKDSKRRADELIERIKDVLRKVKEKIEKLIEDTRR

SEQ ID NO: 14689 - protein, 57 aa, Artificial Sequence
  Synthetic
SEKEVVEELKKTVDDLKRKSEEAIKKAKEAVDKIRRDSERAIRKNEDTLRKIEEEIK

SEQ ID NO: 14690 - protein, 56 aa, Artificial Sequence
  Synthetic
EDILREIAKRIKDLIEDHKRASKEIERDIRKILEDHKRAAEKIRRDLRRLLEDVER

SEQ ID NO: 14691 - protein, 60 aa, Artificial Sequence
  Synthetic
SLEKMVTDIIRKLEEIARRHKTRSDEIVRRLEEIIKTHEKRSKELMDDLKRLVDEVRKKK

SEQ ID NO: 14692 - protein, 56 aa, Artificial Sequence
  Synthetic
EEDIRRLDEEVKDLERRSREEEERLEREVRELEKRSEETIRRVEKKVRDLADELRK

SEQ ID NO: 14693 - protein, 59 aa, Artificial Sequence
  Synthetic
SEEDVVKKVRKKLEDVHRDTRREIRRLEEETKKLHDETRKTIETIERRLRDLRDRLTKE

SEQ ID NO: 14694 - protein, 56 aa, Artificial Sequence
  Synthetic
SEEVRDVKEKLKRNLEEARKASREDLERLKRNLEKADEDVRRLLEELKRLLDEVRR

SEQ ID NO: 14695 - protein, 60 aa, Artificial Sequence
  Synthetic
SLEEAIEDLRRKLEKLLKDYADLSKEIEDKLRKIHEDSRRLVEKLEEEARRILKEVRERG

SEQ ID NO: 14696 - protein, 60 aa, Artificial Sequence
  Synthetic
EEEVRKEIEDADKRVKDLKRELERDIDELRKRVEELRRRHEEKIKKVAEDVKRREDEARK

SEQ ID NO: 14697 - protein, 61 aa, Artificial Sequence
  Synthetic
SRLEKIKRELDKKLKDHEDDSRDKVRKLRESLKRHEDKSRKEEEEVKKTLKELEDKLRRDG

SEQ ID NO: 14698 - protein, 56 aa, Artificial Sequence
  Synthetic
KRLVDDAKRKIKELEEENERLVKEVEDRNRELDERNKRIIDRIRRLNERVKEEAEK

SEQ ID NO: 14699 - protein, 57 aa, Artificial Sequence
  Synthetic
DEVETVIERDKKLLEDWVDRARKVVKRDEDSLRRDEEENRRVVEENSRTVKELKERI

SEQ ID NO: 14700 - protein, 58 aa, Artificial Sequence
  Synthetic
EVVKRVEEEVKRLNERADELLKRVEKRAEELNEESRRLSEEVERKVRELNREADERVK

SEQ ID NO: 14701 - protein, 57 aa, Artificial Sequence
  Synthetic
SEVEEVVKRNSDTAKEDMDRNEKVVEDNSKRLREWEKAIEEVEKEVDKAMKDLKRRI

SEQ ID NO: 14702 - protein, 58 aa, Artificial Sequence
  Synthetic
KLVEDVRREVEKLNRESEERSKRVKEEVDDLNRKLEKLLRDVKEEVKKLLEEAERETK

SEQ ID NO: 14703 - protein, 57 aa, Artificial Sequence
  Synthetic
DEVRKVVEDNERSVREIKEELKRVVEEDKELVDRWRERLEKVVKDNERSAKKIKDDV

SEQ ID NO: 14704 - protein, 59 aa, Artificial Sequence
  Synthetic
DEMLRRIEETIRRLDEELRRLVEEVKRRIDELNREVEKRIREVEERIKEMDKRLREAVK

SEQ ID NO: 14705 - protein, 57 aa, Artificial Sequence
  Synthetic
DEAEKVVEKDRRLIEKWKEDLKELVRRVREKVKEIKKRVADVVKENEDSVRRIEKEV

SEQ ID NO: 14706 - protein, 59 aa, Artificial Sequence
  Synthetic
DEMLRRIDRRAERLNEDVARVIDEVAKRVTRLLERLEEKLKKIRDDIKKLDEELEEAAR

SEQ ID NO: 14707 - protein, 57 aa, Artificial Sequence
  Synthetic
DEVRELVKENRRSVKENEEELKRILDEDERLIRDWKKKLEEVVRKVAELVREIEERV

SEQ ID NO: 14708 - protein, 59 aa, Artificial Sequence
  Synthetic
DELLRRVAETVKRMDEDLNRTTEEIADTIRRLNEEVAKRIREVERTVERLIEELEEAVR

SEQ ID NO: 14709 - protein, 55 aa, Artificial Sequence
  Synthetic
DEEEELEKDARRVLEELRRELERVVREAKDINRRVEELIREVRERAKRVDDELRK

SEQ ID NO: 14710 - protein, 55 aa, Artificial Sequence
  Synthetic
ERVLREVERVLRELEREADEVLKEDRELLERWKKTVKDVVKENRDSLDELAKEMK

SEQ ID NO: 14711 - protein, 55 aa, Artificial Sequence
  Synthetic
SEEERLREEAKEVLKRLREDLKRVEEDVERVDKRLRELNEDVARKLEEVLKRLRE

SEQ ID NO: 14712 - protein, 55 aa, Artificial Sequence
  Synthetic
EKVLREVKRALDDLRRRVEEVLRKNEKSLRELEEENRRVLKKVEDLLEDIIRRLK

SEQ ID NO: 14713 - protein, 60 aa, Artificial Sequence
  Synthetic
REEDEVRKELERVERRIEDLLREVERTNREVIETSERLTKTVEDDVRRVNTEIDRLLKEK

SEQ ID NO: 14714 - protein, 55 aa, Artificial Sequence
  Synthetic
EELLRELEEVLRRIEEKLKKIDDESKKLAKEDTDRNKRIVDENTRLVEEWDKRAK

SEQ ID NO: 14715 - protein, 60 aa, Artificial Sequence
  Synthetic
SVLEEVRKKVERVIRESRELSERVREHIKRTIDEVKKLTEEVRKIVETLIRRLKELLDRV

SEQ ID NO: 14716 - protein, 59 aa, Artificial Sequence
  Synthetic
DEEVRKILTDLRKAVDEDRRRNEKLLKDSEDAVRRDEKENRDILRELRKAIEEIERRLR

SEQ ID NO: 14717 - protein, 60 aa, Artificial Sequence
  Synthetic
SMVDKVREEARKLIEEARRLSEEVKKIIDELTKRVKDLTRTSHELSKRLEDTIRELLKRV

SEQ ID NO: 14718 - protein, 59 aa, Artificial Sequence
  Synthetic
DEKLREILKRLREELKRDEDRNRELLKRVRDRVKKDEEENRENTKRVREAVEKIERELE

SEQ ID NO: 14719 - protein, 60 aa, Artificial Sequence
  Synthetic
DVLEEVRRRAEEVIREARELSKRSHDRSRELIERVKKLTEESHRLSRKLIRELEERLEKV

SEQ ID NO: 14720 - protein, 59 aa, Artificial Sequence
  Synthetic
DEEVRRILKELRDEVKRDEERNRKNTKDVKDEVDKDRRTNEKNTEDAEREIRRIKEDAR

SEQ ID NO: 14721 - protein, 60 aa, Artificial Sequence
  Synthetic
SVLEDVRRDVERLRREIEELSKRSHERSRRIIERLEELLKRSHDLSKRLRERLEELLKRV

SEQ ID NO: 14722 - protein, 59 aa, Artificial Sequence
  Synthetic
DEEVRRILKKLRDDVKKDEDDNRRNTEEVRKLAKDIERKLKKNTDDVRKDIKAIEDRLR

SEQ ID NO: 14723 - protein, 60 aa, Artificial Sequence
  Synthetic
SVLEKVKELLDRLIRELEELVKTVEEIARRLITEVRELTERSHELSRRLIKELKRLLDDV

SEQ ID NO: 14724 - protein, 59 aa, Artificial Sequence
  Synthetic
DEEVRRILEEITRVLEEIATRLKRILDELRKAVDKDRKDNERNTEEVRKLIEEIKRRLK

SEQ ID NO: 14725 - protein, 59 aa, Artificial Sequence
  Synthetic
SLLDEVRRKVKEVEDRLRKLVKDSHELSRRLIEEVERLTKTSHELSRRLIEELRELLKR

SEQ ID NO: 14726 - protein, 59 aa, Artificial Sequence
  Synthetic
DKDLRDILRKLREVLEEIERRLRKNTEDVKKVVDDDRKRNKDNTDEVRKAIREIEERLR

SEQ ID NO: 14727 - protein, 57 aa, Artificial Sequence
  Synthetic
SEIERLLEEDTKRLRDWEEAIRKNLEDSEREAKKLKDRVKKLLDDARRDIDRLKKER

SEQ ID NO: 14728 - protein, 59 aa, Artificial Sequence
  Synthetic
EEILDEVRRRLKTLNDDVERLLREVHERSKKLRETVRKIVEEVEKRITELRDRVRRAAK

SEQ ID NO: 14729 - protein, 57 aa, Artificial Sequence
  Synthetic
SDIDRLLEEDKKKLDDWRRAIEKNLEDSERRAREIKERLKKLLDEVRREAERLKEER

SEQ ID NO: 14730 - protein, 59 aa, Artificial Sequence
  Synthetic
EDILREIAKRIEDLNKEVEDLLRTVHKESRRLDREVEEIVRRVKEEIDRLIREVREAAK

SEQ ID NO: 14731 - protein, 57 aa, Artificial Sequence
  Synthetic
SEVDKLLEDDRKALEEWERRITKNLEDSKREIDDIRRRLRKNLEDSRRAIKEMKDRR

SEQ ID NO: 14732 - protein, 59 aa, Artificial Sequence
  Synthetic
EEILKRIADEIKRLNDEVKKLLEEVHERSRRLIEELRRLLEEVHRRSRKLIREVEEAAR

SEQ ID NO: 14733 - protein, 60 aa, Artificial Sequence
  Synthetic
SAEEEIEERLKRAIDRDEESVKRSAEEIKRLIEELKKSVDDSARELKELIERLKKLKKDG

SEQ ID NO: 14734 - protein, 58 aa, Artificial Sequence
  Synthetic
KEIKDLLDRVKKEVERSKRKSAKLLKELEDAIKEIEDRSRELLERAREELKRVKDDKR

SEQ ID NO: 14735 - protein, 59 aa, Artificial Sequence
  Synthetic
DETKRVRDLIRELIKRDEESVRRSARTLEELIRRLEESVKRSKKLVEDVIRKLKKLVKD

SEQ ID NO: 14736 - protein, 58 aa, Artificial Sequence
  Synthetic
EEAKKLLEDVEEAVERSKRKSRKLLEDARRALEKVKRDSDKLLEDVREEVERVLRTVK

SEQ ID NO: 14737 - protein, 60 aa, Artificial Sequence
  Synthetic
DELEKIAEELDKLIRDDKKSVDESKRLLEDLIRRDRESVEESERELTELRRRLDELRRRG

SEQ ID NO: 14738 - protein, 58 aa, Artificial Sequence
  Synthetic
REIKELLKRVRELVRESKERSRAVKERLKEEVKESERRSRELLERVRRDLEKIERDTR

SEQ ID NO: 14739 - protein, 59 aa, Artificial Sequence
  Synthetic
SELERIKKELEELIERDKKSVKDTARRLEEMERRLRESVRKSEEDLRRMIEKLEKLVTD

SEQ ID NO: 14740 - protein, 58 aa, Artificial Sequence
  Synthetic
DEARKLLEDVKRLVEESKRESKRLLDEVKKVIDRLRERSEKLLRDVERALREAEERTR

SEQ ID NO: 14741 - protein, 60 aa, Artificial Sequence
  Synthetic
EEDERIRRDLEEAIRRDRKSVEDTREELRKMIEDDERSVRDSEEKLKELIKRLEELVREG

SEQ ID NO: 14742 - protein, 58 aa, Artificial Sequence
  Synthetic
DEIRELLRRVRELVKKSKDDSRKLLEDVKRELERSKEESKRLLDEVKRAIDEIRERDK

SEQ ID NO: 14743 - protein, 60 aa, Artificial Sequence
  Synthetic
SELERIEEELKKLIEDDKKSVDDTRKELDRAIEEDKRSVERSERDLRRMIKKLEDLVRRG

SEQ ID NO: 14744 - protein, 58 aa, Artificial Sequence
  Synthetic
DEIRKLLEEVKKLVEESKRTSEELLKEVDRRLRRSEDESRKLLEEAKKAVKRIEEETR

SEQ ID NO: 14745 - protein, 59 aa, Artificial Sequence
  Synthetic
DELEEIKRRLKELIDRDRESVKRTEDELRELIKRLRKSVDDSRKEAERLIRELERLVKE

SEQ ID NO: 14746 - protein, 58 aa, Artificial Sequence
  Synthetic
DEIRELLERVERALRESKERSRKLLEDVRRAIEKVERDSEKLLKDVEEALERVKRERD

SEQ ID NO: 14747 - protein, 60 aa, Artificial Sequence
  Synthetic
REEDEIRRELKELIERDERSVEETRKELEELIRELEELVKRVEDDLRRLIEKLEDLRRKG

SEQ ID NO: 14748 - protein, 58 aa, Artificial Sequence
  Synthetic
DEARKLLKEVEELLRRSKRKSEELLKRVEELLRKAREDIRRLLEEVKRVIDKVKKDTD

SEQ ID NO: 14749 - protein, 57 aa, Artificial Sequence
  Synthetic
SDVERIIRENERKAKEIKDKVRKVIEDNERSVEEIKEKAERIVREVRKTLEEIRKRI

SEQ ID NO: 14750 - protein, 59 aa, Artificial Sequence
  Synthetic
KEMVERVERLIEEVARRSEELLRRIAKLVEDVNRESERLIREIKELAREVEKELKERAD

SEQ ID NO: 14751 - protein, 57 aa, Artificial Sequence
  Synthetic
SEVDDIIRKNEELLKKIEDDARKILKENEERVEEIKERIKKLIEDDRRKLEEIKRRI

SEQ ID NO: 14752 - protein, 59 aa, Artificial Sequence
  Synthetic
EEALDRIRKLIEKVKRESEKLLEDIKRLIDKVDKDSERLLRTVKKLSEDVEKELKDTTK

SEQ ID NO: 14753 - protein, 57 aa, Artificial Sequence
  Synthetic
SEVDEIIKDNERELDEVRREVEEIDKENKERLKEWVEEAREILDRLRKDLEEIRKRV

SEQ ID NO: 14754 - protein, 59 aa, Artificial Sequence
  Synthetic
REALDRLRRLIEKVVEDSRRLIKKVDELLKKVNKEIEDLVREVKDLVRRVKEELDRRVK

SEQ ID NO: 14755 - protein, 57 aa, Artificial Sequence
  Synthetic
EEAERILKKDDDSVRKIKKEADRIVRENERLAEEIKKEVRKIIEDDKRTLEEIEKRI

SEQ ID NO: 14756 - protein, 59 aa, Artificial Sequence
  Synthetic
EEMLRRVEEDLRRVNEESERLIRRIAKEVKRVTDESKKLLEEVKRISETVIEKMKEDAR

SEQ ID NO: 14757 - protein, 57 aa, Artificial Sequence
  Synthetic
DEVEEILKRDEEALRDIEKKVREVDERNRREVEKIKEKVKEIIKRDKDELDEIRKRI

SEQ ID NO: 14758 - protein, 59 aa, Artificial Sequence
  Synthetic
EEVLKRLEEEARRVNKTSKDLLKEVEDKIRKVNRKSEELLKKVEELSRRVIEEMRRRVK

SEQ ID NO: 14759 - protein, 60 aa, Artificial Sequence
  Synthetic
RELEELIEDLRRALERSREEVTRLLKDLEDANRRSHRHNEELIKRLRKILKEARDRVKRD

SEQ ID NO: 14760 - protein, 59 aa, Artificial Sequence
  Synthetic
EEALKDLRRVVEEVKKRSTDLNREVAKVIEEVKKRSEDLNRELEKLNRDIEERIDRETR

SEQ ID NO: 14761 - protein, 61 aa, Artificial Sequence
  Synthetic
REEEEARKILERLEEELKRSLDEVRDLIEKATKESKDVNEKIRKLLEELKEELRKVVEDTG

SEQ ID NO: 14762 - protein, 55 aa, Artificial Sequence
  Synthetic
EELVKDVERKLKRVAEESRKLVEDLRRRIKESREEIKRLVEDLERVLKEIKEEAK

SEQ ID NO: 14763 - protein, 61 aa, Artificial Sequence
  Synthetic
REEEEALKRIRETSERIKRVVDDLHRRNKKSTDDIKRRVDELHKRNEKIVREVLDVIRRRG

SEQ ID NO: 14764 - protein, 56 aa, Artificial Sequence
  Synthetic
SEVLRELDRRTKELKRRADELVTENRKLSKELEDEIRRLAERNRDAIRKIDKAVKE

SEQ ID NO: 14765 - protein, 61 aa, Artificial Sequence
  Synthetic
DEEERALETIRDTSRRIEERIDDLRRRVEKIVRDIEETIRRLHEENRKIAERVKEVIERRG

SEQ ID NO: 14766 - protein, 56 aa, Artificial Sequence
  Synthetic
SEVLKELEDETRRVKERVDKIIKELEERVEDVERKVRELVKRNEELLKKIKDDADK

SEQ ID NO: 14767 - protein, 61 aa, Artificial Sequence
  Synthetic
SREEDAVRKIRKLVEDVTRETKKMLEDVRRLVETVEKLTDDLLEEVRRLVEEVEDEIRRAG

SEQ ID NO: 14768 - protein, 56 aa, Artificial Sequence
  Synthetic
SELLREVEDLLRRHHETVRRILDEIRRLIERHHRRVREILKELDKLVKDAADEVRR

SEQ ID NO: 14769 - protein, 60 aa, Artificial Sequence
  Synthetic
SEVERVEEEVKRLATEVEKSNRDSLREIEDLNRRDRDISRRVKEEIERLIREVKKLIDDR

SEQ ID NO: 14770 - protein, 60 aa, Artificial Sequence
  Synthetic
EKKVKELLERAKKIADELRKHIKRTLKKVEEEVEKNKRDNDKLLEEARELIKRLDDEVRR

SEQ ID NO: 14771 - protein, 60 aa, Artificial Sequence
  Synthetic
DDLERVRKEIEDLNREDKRRSEEVRREVKKLIEDLEDSNRRSLEEVDRLVETVRELIDRE

SEQ ID NO: 14772 - protein, 60 aa, Artificial Sequence
  Synthetic
KEKVKRLLRTVRELMKKNKRDNDRLLKEAEDEARRVKRHIKESLKRIEEEIRRLKERLER

SEQ ID NO: 14773 - protein, 60 aa, Artificial Sequence
  Synthetic
DELEKVAEDIKKLNKEDRDRSDEVRRAVKELVKEVEKKDKDIKRRAEELIREIKEDIERR

SEQ ID NO: 14774 - protein, 60 aa, Artificial Sequence
  Synthetic
REKVRKLLEDVEREARKNEEDNRKLLKDIREEIRRLADRSRKTLEDAKRLIEKIERDLEK

SEQ ID NO: 14775 - protein, 57 aa, Artificial Sequence
  Synthetic
SEVEEVLKEIEEMLRDLERRVKESDEENRDSLRKIREDVERVDEENRDTLRRIKEKV

SEQ ID NO: 14776 - protein, 55 aa, Artificial Sequence
  Synthetic
EKVMKEVRDVIARLRDELEKVTEDSRRVNKELKKRLEDVVREIRRANEELDERVR

SEQ ID NO: 14777 - protein, 57 aa, Artificial Sequence
  Synthetic
DEVEKVLEEIKRALDDLRKKVEESKREIKEALKRVEKHTRDSDTDNKRTLREIEERV

SEQ ID NO: 14778 - protein, 55 aa, Artificial Sequence
  Synthetic
ERVVEEVRRVLEELRRRLEKVTEDSRRAIERLEREDRRVSKKSKDVNKKLDDDVR

SEQ ID NO: 14779 - protein, 55 aa, Artificial Sequence
  Synthetic
DSARKVEREVEEAARRVERTLEDVTRKVRELHDEVRRRLEEVKRRIEDLHRRVDE

SEQ ID NO: 14780 - protein, 59 aa, Artificial Sequence
  Synthetic
KDTVKRVLDDVARIVKRIEEDIKRVLEESKKLVRDIEKEIRDVKKESRDLVREIREKIR

SEQ ID NO: 14781 - protein, 56 aa, Artificial Sequence
  Synthetic
SSAEEVKRELEERHRDLRRTDEELRKDLDRVHDRARKILEEIEKKIRDMHRKVKER

SEQ ID NO: 14782 - protein, 59 aa, Artificial Sequence
  Synthetic
ERKVKKVRDESNKVVEEIMRHSDKVLERSRRLVEEIRRRLEEVLRTSREVVRRIRDEVR

SEQ ID NO: 14783 - protein, 55 aa, Artificial Sequence
  Synthetic
REVEEVLKEIEEMLKRIEDDVRRVLEEIKDVARRNEDEVRKLLRENEESVEEIKR

SEQ ID NO: 14784 - protein, 55 aa, Artificial Sequence
  Synthetic
RKVVEEVRKLLTDLKRLLEEVVKEVRKRLKELHDRTRTVAEEIRDINKKLKEEVN

SEQ ID NO: 14785 - protein, 60 aa, Artificial Sequence
  Synthetic
SSVDEVRRTIEELIRRVEELVKRSKDHVDETERRVKELVRRSHELTKEVIERVEELLRRL

SEQ ID NO: 14786 - protein, 59 aa, Artificial Sequence
  Synthetic
EDKVRKLVEDLRRALEKIRREIEKSTEESDRVLRRIEEEIRRDSEELKRALREAEEEVR

SEQ ID NO: 14787 - protein, 58 aa, Artificial Sequence
  Synthetic
SEVEELLKEVERLVREVEERVRRLHETDRKLLEDVKRKVEELHREDKKLADEVREAVK

SEQ ID NO: 14788 - protein, 58 aa, Artificial Sequence
  Synthetic
EDVERLRRELEKVAEKIRRLVEANRKTVEDARREIEKLLEENRRELDKVRRDVEREAK

SEQ ID NO: 14789 - protein, 62 aa, Artificial Sequence
  Synthetic
KEVDDLLKEVRRLVREVEKELKRLHDENRKSSEEIARRLEELHKESKELVERVKETLRDLRK

SEQ ID NO: 14790 - protein, 59 aa, Artificial Sequence
  Synthetic
EKVVRDLEREVREALRRLEEILRRDEDDVRRSREELKRIIDENREEVKRVLRELEETLR

SEQ ID NO: 14791 - protein, 60 aa, Artificial Sequence
  Synthetic
SEVDELVERNERLVDEVRRRVEDVARKLEKVSRDSDDLVRRSNEELEDRLRKVEKRVREE

SEQ ID NO: 14792 - protein, 59 aa, Artificial Sequence
  Synthetic
KKKLDEIRERSKRANDTLRKLLEDIRKRVEDSIRRLDELLKRSETRVRDIIKKLEDELR

SEQ ID NO: 14793 - protein, 60 aa, Artificial Sequence
  Synthetic
DEVDELERRNERLAEDVRRKVREVEERLKELSKRSMDIVKDVLRRLKELVDRVEKKVREK

SEQ ID NO: 14794 - protein, 59 aa, Artificial Sequence
  Synthetic
EKKVEEIREKSERVNRDLEDKLRKIEEKVKESEKRLRDLLREIEERIKRAIEKLERDLK

SEQ ID NO: 14795 - protein, 60 aa, Artificial Sequence
  Synthetic
SKVEELTERLRRLSKRSEEEVEKSNKDNDELVRRVLKRVKEVMRELEKLVEKVKEDVRRE

SEQ ID NO: 14796 - protein, 59 aa, Artificial Sequence
  Synthetic
KETLDRIRKEVEDSIERLKKLLDDSRRRSKEANDALRKLLKEIEDTIRRAIEELERARR

SEQ ID NO: 14797 - protein, 60 aa, Artificial Sequence
  Synthetic
SRVEELTEENRRLAKRLKEVVKKVLDELRRRVEEVKERVERSNKKLRDLVREVDERVATK

SEQ ID NO: 14798 - protein, 59 aa, Artificial Sequence
  Synthetic
EEIVRRIEEESKKVNRELEELLRKIEDDIRKAEEELRELVERSKREVDKALDDIDRRTR

SEQ ID NO: 14799 - protein, 61 aa, Artificial Sequence
  Synthetic
KEVDDVKKELDDVDREVKELIKRAHDKNRKVVKEVEDELRRLTEDDKRVADKVRELLKKVR

SEQ ID NO: 14800 - protein, 59 aa, Artificial Sequence
  Synthetic
KDKMKEVEDEVRKVLDTIRKLLKRDEEAVKEALDKVKKMLDDARRHSEKVLREVEDTLR

SEQ ID NO: 14801 - protein, 56 aa, Artificial Sequence
  Synthetic
SEVEELLKEVRELARRIEEEIKKLHRRNEELARRIKETIKRLIDENRKLAEDVRRD

SEQ ID NO: 14802 - protein, 58 aa, Artificial Sequence
  Synthetic
EDAKRIRDELERVRKSIEKLIRDNERFLEKVERDIRKLIEENEDLLRKIKEDVERKEK

SEQ ID NO: 14803 - protein, 56 aa, Artificial Sequence
  Synthetic
DEVRELLETVRKLAEDVERRIRELIKENERLAREVERRIKELHDRNRELAREVEEK

SEQ ID NO: 14804 - protein, 58 aa, Artificial Sequence
  Synthetic
KEAREIERELEKVKDTIRRLLERNEELLEEIARRITKLLEEDKELLERIERRIAEKLK

SEQ ID NO: 14805 - protein, 60 aa, Artificial Sequence
  Synthetic
SEVETLLRELKRLAEEVKKRIEELDRELKKLSDDVRREIERLIRENERLAREVLKEIRDL

SEQ ID NO: 14806 - protein, 59 aa, Artificial Sequence
  Synthetic
EEALREIEKLLRKVEEDVRRLIEKLKKSLEDSARDVDRLVKENERILEEVAREVEKLLR

SEQ ID NO: 14807 - protein, 60 aa, Artificial Sequence
  Synthetic
KEVEDLLRDLKRIVDEVEKRIRKLIEDNKRLADEVRERIERLHKRNKDLAEEVLKRVREL

SEQ ID NO: 14808 - protein, 59 aa, Artificial Sequence
  Synthetic
KEVVKRIKEELDRVREEVKKLIKRNEELLKKVAEDVRRLLEKDKKALEEIKRRVEDELR

SEQ ID NO: 14809 - protein, 56 aa, Artificial Sequence
  Synthetic
DELEELRKRVKENEDEVEKVLRELHKLNEENKEEVDRALEELRKRVRDIEEEIKKE

SEQ ID NO: 14810 - protein, 60 aa, Artificial Sequence
  Synthetic
RKDVVDKVRKVIEEVHKRSRDLAKEAREVNRRVHETTKKLVEDVRRVIEKVEEDVRRKVK

SEQ ID NO: 14811 - protein, 56 aa, Artificial Sequence
  Synthetic
SSLEEADKKVDKNRRDVDRALEELHRRNKRNEEEIRKALKENRETNKRLLEEIRKN

SEQ ID NO: 14812 - protein, 60 aa, Artificial Sequence
  Synthetic
REDAVRRVDKVIKEVHDESKRLVDELRDRNRRVHDETRRLDEESKKINRTVEELIRRKET

SEQ ID NO: 14813 - protein, 61 aa, Artificial Sequence
  Synthetic
DKVEELLKRLEESTRRILKRVEELLRENERLAREVRKTVERLLEENRRLIEEVERRVRRDK

SEQ ID NO: 14814 - protein, 59 aa, Artificial Sequence
  Synthetic
EKLRRELRRLLRESEKKIKEMLDRNKELLDEIERTIRELLKRNEDLLREVRERAKEADK

SEQ ID NO: 14815 - protein, 60 aa, Artificial Sequence
  Synthetic
DEAEDLLRKLKRSTDEIKKTVEKLLRENEKTSRDIEREVRELLRRNKELAERVEEVARRE

SEQ ID NO: 14816 - protein, 59 aa, Artificial Sequence
  Synthetic
EKVRRELERLLRESEKEIRKLLKRNKELLDESRDTIREMLERNKRLLEEVRKKIEKMKE

SEQ ID NO: 14817 - protein, 61 aa, Artificial Sequence
  Synthetic
SEAERLLEELKRSTDEIKKRVEKLLEDNKRTSEEIEEEVRRLLETNRKLIEDVKRKVERDR

SEQ ID NO: 14818 - protein, 59 aa, Artificial Sequence
  Synthetic
ERVRRELEKLLRDSERKIKEMLERNEKLARDSEERIRRMDDKNKDLLRRVKETIERKLK

SEQ ID NO: 14819 - protein, 61 aa, Artificial Sequence
  Synthetic
DEVEDLLRKLEESTRRILERVKKLLEDNKRLIDRVRKEVERLLRDLKRLAKEIDEEVRRDN

SEQ ID NO: 14820 - protein, 59 aa, Artificial Sequence
  Synthetic
ERVIRELEELLKESKKRIDDALRENEKLLREVKRRIEEAERTIKELLEEIKRKIAEEEK

SEQ ID NO: 14821 - protein, 60 aa, Artificial Sequence
  Synthetic
KEAEELKRRLEDLVRRVEEDNRRLLEEHKKLVKDVRKRAKELLETHKKLVEDVTREVRKS

SEQ ID NO: 14822 - protein, 59 aa, Artificial Sequence
  Synthetic
REVLEDLKRDLERARKINEESEKRIKDSDKRVHEEIRRVLEEVKKSDEEVRRRADRERE

SEQ ID NO: 14823 - protein, 60 aa, Artificial Sequence
  Synthetic
REVDELRKELERIVKEVEDVIRDLNKKLKDILKDVKDKSDELNERLKKIVEDVRRLIRDV

SEQ ID NO: 14824 - protein, 59 aa, Artificial Sequence
  Synthetic
DKMVEELERLLDEARRRVEEAIRSNEELLKRIEEESERTVRSNEKLLKEAEEEVRRAEE

SEQ ID NO: 14825 - protein, 61 aa, Artificial Sequence
  Synthetic
DEVEDVERDLKRILKEVKDRSDELIERNRKSTEDMKRRSKELNEELRRIIEDIRRLIRDTK

SEQ ID NO: 14826 - protein, 59 aa, Artificial Sequence
  Synthetic
SKMVERLERLLEEAERTSRETLKRLEDTLRESEKRSRETVRSNEELVKEVTKEVEDAKK

SEQ ID NO: 14827 - protein, 60 aa, Artificial Sequence
  Synthetic
DEVETVLRDNERTTKEAEDDVRRLNEELKEIIKRVREVSKRLIDELRRILEDVERRAREV

SEQ ID NO: 14828 - protein, 59 aa, Artificial Sequence
  Synthetic
SDFVERLRRTLEESKDKARRNVESNRELLERARKDSKRTLEELERLLETVRKSVDEMKK

SEQ ID NO: 14829 - protein, 61 aa, Artificial Sequence
  Synthetic
EREERLEEKLKKSVDDSRELIERVLRKHEKVSDKVRRELERILEDHKRVLEEIKRVLKDRR

SEQ ID NO: 14830 - protein, 55 aa, Artificial Sequence
  Synthetic
ERLKDLLDKAHEEDRRAKEEVKRLLEDTTKKIKEFLDRVERSNEEVERELEKAER

SEQ ID NO: 14831 - protein, 60 aa, Artificial Sequence
  Synthetic
DKDRKIKRIIEEVKKTIRKLLDDVRRINEEVLKELRKLLREVEEINKEILRRLKELVKTS

SEQ ID NO: 14832 - protein, 59 aa, Artificial Sequence
  Synthetic
EKVKKELDDEIRDAERELREAKKDMDRSNEELREEIKRAEERLRRLDEKLREEVEKDRK

SEQ ID NO: 14833 - protein, 60 aa, Artificial Sequence
  Synthetic
SVKEEIKEMLKKIKRHSDEALKKNKETLDRDRKRVEDVIRELKKLLDEIRKRVEDVRRRV

SEQ ID NO: 14834 - protein, 59 aa, Artificial Sequence
  Synthetic
EEIARKVRELLERVLRDDRRVVREVEELNRRMHKKNEEVAKKVRDLLREVRKELEDVDR

SEQ ID NO: 14835 - protein, 63 aa, Artificial Sequence
  Synthetic
REAEELLKELDEIIRRVEEEVKRLLDKVRETTKRIEEEIRKLDEDLKEIIREVEERIRKLKSD

SEQ ID NO: 14836 - protein, 59 aa, Artificial Sequence
  Synthetic
EEVERRIKRLREKVKKKIDELKERVRRLLEESRRKAERVEESNRDLLRELKERLEERRR

SEQ ID NO: 14837 - protein, 60 aa, Artificial Sequence
  Synthetic
SFEEEIKKIADEVEKRIRDAEKRSKDILEKSREVVERAKRRSEKLLRDAEREIKRVMEEK

SEQ ID NO: 14838 - protein, 55 aa, Artificial Sequence
  Synthetic
DEMLRRLKKVTDDVRKRLEDSHRRLEKVTEESRKRADESHEELRKLIEEVREKLK

SEQ ID NO: 14839 - protein, 58 aa, Artificial Sequence
  Synthetic
SSKERIEKILREVKREIEEAEKRSRDILKDSERIMRDVKRTTDDLLRKAEEIIREVAK

SEQ ID NO: 14840 - protein, 55 aa, Artificial Sequence
  Synthetic
EEVLKRLRELIDTVRRVLEESHKRLRELTKRSEEEARRVNEELRELIDRVRREAE

SEQ ID NO: 14841 - protein, 60 aa, Artificial Sequence
  Synthetic
DVEKRIEELRERSDRIIDEARKRSEKLLRESEKMMRDVDKTTEDILREAEEEIKRVLDEK

SEQ ID NO: 14842 - protein, 55 aa, Artificial Sequence
  Synthetic
ERVLKDLERLSKESEDELRRSHEELKRLTEESRETIEDVNRKIKEKIEDVKRKLK

SEQ ID NO: 14843 - protein, 60 aa, Artificial Sequence
  Synthetic
SAEDSIRELLERDERLLEEARKEAKRLNEENERLLERIEETVRRLLEEIKRLLDDIRKKI

SEQ ID NO: 14844 - protein, 59 aa, Artificial Sequence
  Synthetic
EELVKRVEERIKRLHDENRRLVKEVIEEVEKLIRDNEKLAEDIEREIRRLLKELDEAAK

SEQ ID NO: 14845 - protein, 60 aa, Artificial Sequence
  Synthetic
SEVEEIVKEIEKLIKENEEVVREVEKEIRELIKRNREVVERIRKELEKMLRELERLAREG

SEQ ID NO: 14846 - protein, 58 aa, Artificial Sequence
  Synthetic
EARERIKELVRRNERLLREVEKRLKTLSEENKKLLEDAKRELDRILKEVRDLLRETER

SEQ ID NO: 14847 - protein, 59 aa, Artificial Sequence
  Synthetic
SRVERLSAEIKKLIDENRRVAEELLRELEKLLKDNEDVVREVERRIRDSSRKLEELARA

SEQ ID NO: 14848 - protein, 58 aa, Artificial Sequence
  Synthetic
EAREDMDRLVRENERLLKKVEDDLRKLSEENKRLVDRARERLARLLEENERLVDERRK

SEQ ID NO: 14849 - protein, 56 aa, Artificial Sequence
  Synthetic
REAEEALKRVKEILKRIAEEVERVLTEVKKLSEDVKRRVEEVLTRLKRSTEEIERK

SEQ ID NO: 14850 - protein, 56 aa, Artificial Sequence
  Synthetic
KKLVEDVDREIKKLLEEVTKKAKRLNDENKRLLDDVRDKARRVIEESREVLERARK

SEQ ID NO: 14851 - protein, 59 aa, Artificial Sequence
  Synthetic
SSEEEVEKLERKVRAVIRKAEEDLEDSLRKSEKMAKEVTDEIEKSRRKAKAVIDDARRR

SEQ ID NO: 14852 - protein, 55 aa, Artificial Sequence
  Synthetic
EEVLKKVEELIRKVEKVIRTVLEEDRKVSEDSLRKMRKVLKEDEDVIKEVRDRAQ

SEQ ID NO: 14853 - protein, 59 aa, Artificial Sequence
  Synthetic
SMKEEVDRLLKEVKDVIREVRERIKKSEEDVRRVIDDARRKLEELSKRAREVVEEVRRR

SEQ ID NO: 14854 - protein, 55 aa, Artificial Sequence
  Synthetic
EEVLKRVKELIDEVRERIEKVLTDDRRLIERVKREIERVIRENEKVIRDARERLR

SEQ ID NO: 14855 - protein, 60 aa, Artificial Sequence
  Synthetic
DEVEKLLRDLEELDRDIERKVRELLKRNKEVLDDIEREVRRLEKELRRIIKEVADVIRKT

SEQ ID NO: 14856 - protein, 56 aa, Artificial Sequence
  Synthetic
KKEVDKIEKHSRDLIERAKRETDRLLEEAERLMREVVDRVRKILEEAKRLIDEARR

SEQ ID NO: 14857 - protein, 60 aa, Artificial Sequence
  Synthetic
DVEDEARRLEKELRDILREIADDIRKLLEENKELLKESEKDIRRAEKAIEDILDDVRKRI

SEQ ID NO: 14858 - protein, 59 aa, Artificial Sequence
  Synthetic
EKLLTEVSEEVKRLADELRELARRVKEEVKKLLDDNRETTDRIRRTVTELLEELKRKTK

SEQ ID NO: 14859 - protein, 60 aa, Artificial Sequence
  Synthetic
SVDETITEVIKRIEDTLRKVKEDADRLDERNKALLEDSKKKIKEVEEELRRILEEVRRKV

SEQ ID NO: 14860 - protein, 59 aa, Artificial Sequence
  Synthetic
RELVEEVKERAERLLKELEDLIKKVKEEVERLLEENRKTTEDILKRAKDLARELRKRTK

SEQ ID NO: 14861 - protein, 60 aa, Artificial Sequence
  Synthetic
DAKESIEEVKKRLEKSLEDSERESRKTLEENKDLLRRSREEIKKALDRLKDLLRRAEERI

SEQ ID NO: 14862 - protein, 59 aa, Artificial Sequence
  Synthetic
EKLVEEVEREVERLLRENEKTSDEIKKTSEELLKRNEETTRRILEEVERLLKRVKEATD

SEQ ID NO: 14863 - protein, 60 aa, Artificial Sequence
  Synthetic
KVEETATRLREEVKRSDTEVHRENRESEDRNKKSDEEVHKTIRDALKRVKDKLDDVRRRR

SEQ ID NO: 14864 - protein, 59 aa, Artificial Sequence
  Synthetic
DEIVRRVKEEVERLLEEHRRLAKRVRDENRRSTEEHRDLVRKVKREIERLEEELDRAEK

SEQ ID NO: 14865 - protein, 60 aa, Artificial Sequence
  Synthetic
KVEESADRARREVKRSDEEVRKRNTDSREEIKKSDKEVHERIRELLERIRRILDEVRKKR

SEQ ID NO: 14866 - protein, 59 aa, Artificial Sequence
  Synthetic
DEIVRRVEDEIEKLLREHRELVKDVERENRRLLEEHKKLVEEVEREVRRMMKKLRDATK

SEQ ID NO: 14867 - protein, 60 aa, Artificial Sequence
  Synthetic
KVEEEIEKLLRHNDELLKEVEKRAREVEERIKRSDEAVHDSIRKLLEDVKRILDEARRRR

SEQ ID NO: 14868 - protein, 59 aa, Artificial Sequence
  Synthetic
DEIVERVEREVRKLDDDDRRLAERVLRRAEELLKRHKELVERVEREVERLLKELEDAVK

SEQ ID NO: 14869 - protein, 60 aa, Artificial Sequence
  Synthetic
KAEDEARRLERHNKELLKEVRKDNTRSEREIEESDKRAHDEIKRLEEEVEEILKDIERRR

SEQ ID NO: 14870 - protein, 59 aa, Artificial Sequence
  Synthetic
DEIVERVRRTVKKLDEDDDKLVKDVRKENKDLLRRHEELVREVTERVKKLLRDLREASR

SEQ ID NO: 14871 - protein, 60 aa, Artificial Sequence
  Synthetic
DVEDEVRRAEESNRDSDRKVHEEVRRVLKSNRDSDTKAHRDVEEAKRRLKTELKDIERKR

SEQ ID NO: 14872 - protein, 59 aa, Artificial Sequence
  Synthetic
KRLVDKVRTEIKRLNDEHRKVLKKVRDLVRKLNEDHERVVRDVRREIKRLRDELRETAR

SEQ ID NO: 14873 - protein, 60 aa, Artificial Sequence
  Synthetic
DVEDEVRKMKKELDELLKRAEEEVKRVLESNEKSDDEVHKRAREAEEELRRLLDDVRRRR

SEQ ID NO: 14874 - protein, 59 aa, Artificial Sequence
  Synthetic
KKVVKDVEKKIRDLLTKLREVLRRVRREVKKLNERHEDILREVERLIEELRKRLEDTTK

SEQ ID NO: 14875 - protein, 60 aa, Artificial Sequence
  Synthetic
DIEDEVREAIERLKKLLEDSEREVRESIKRLRDLLREIARESEEANERIKRLLEEIERKV

SEQ ID NO: 14876 - protein, 59 aa, Artificial Sequence
  Synthetic
EDVRRRLRELVEKVMREIEDSNRKLRKLSKDSEKAVRDAERRNRKLVREIEDRIRKSLK

SEQ ID NO: 14877 - protein, 60 aa, Artificial Sequence
  Synthetic
EVDKEVRKVLKDIERLLEEIERRVRKSIEDLKTELKKIEDESEKANRELERLLREIKDRV

SEQ ID NO: 14878 - protein, 59 aa, Artificial Sequence
  Synthetic
EDVRRELRELVDKVRKDVERVMKALEDLSRESRREVRRVKEKNRRLVEEVKKRVEDKAK

SEQ ID NO: 14879 - protein, 59 aa, Artificial Sequence
  Synthetic
SEDEDMVRDVKRLIDEVRKLIERVKREVEDLIRRLNELDERVVRTSEELARDVKRLVDA

SEQ ID NO: 14880 - protein, 56 aa, Artificial Sequence
  Synthetic
SEDVERLKEEIKELLDRARRTIEELERRIRENVKRSRKKIEDLVRRHKKILDEARK

SEQ ID NO: 14881 - protein, 59 aa, Artificial Sequence
  Synthetic
REKEEAVKTVKELIKEVREMVERLHRKNEEMIRTVREVVKELNERNKELIKTVRDLRRR

SEQ ID NO: 14882 - protein, 56 aa, Artificial Sequence
  Synthetic
SEDARRLEREVRELLRDVREKVERNKEKVERLKREVRKRVRDDLERVKRLKEEVDT

SEQ ID NO: 14883 - protein, 59 aa, Artificial Sequence
  Synthetic
SEDERAVREVEKLIKRVEEVVRRLNERNRRLIEEVRRIVEELHRRNEDLIRKVRELAER

SEQ ID NO: 14884 - protein, 56 aa, Artificial Sequence
  Synthetic
SREMERLEREVERLLREVERRVKEDEERVRKLLEEVERLVRRNARKVEELLKEVEK

SEQ ID NO: 14885 - protein, 63 aa, Artificial Sequence
  Synthetic
SEKEKLTEDIERIIDKVRREVERLNEENERLIREVRKRVEKLNRENKEAIKRVEEEVRRLRDR

SEQ ID NO: 14886 - protein, 56 aa, Artificial Sequence
  Synthetic
EELVKRLEEKIRELLKRARDLVKEDEDRIRKLLEEIERVNRDDKRKIDKLLEEVRR

SEQ ID NO: 14887 - protein, 60 aa, Artificial Sequence
  Synthetic
KSDEEVRERVERLLREVRRLTREVRRHAKETLDTVAELVDRVRREAERLLREVEELLRRL

SEQ ID NO: 14888 - protein, 56 aa, Artificial Sequence
  Synthetic
ETEVRDVKRKADEIKEEDKRILEEAEKRHKELLEDLKRLLDRIKEEVKRVREDIKT

SEQ ID NO: 14889 - protein, 59 aa, Artificial Sequence
  Synthetic
REEDEARKRLKELLDRITKLSKEVRDLIREMLRELEESIERTKREIDDLLRRLEEIRRA

SEQ ID NO: 14890 - protein, 56 aa, Artificial Sequence
  Synthetic
SDEVERVKREIEEHLRRSEEDIRRVAEEIKKLVEESRRVIEEAKDRVRRLVERVKK

SEQ ID NO: 14891 - protein, 60 aa, Artificial Sequence
  Synthetic
SEEDDARRKVEELLRRDKKVVDEVRDELRKLLEELRRLSEEVEKLIRKLEKELREVRKRG

SEQ ID NO: 14892 - protein, 55 aa, Artificial Sequence
  Synthetic
ETVKKVEDEVRDSLRRAKKIIEDAARAIRKHLEESKRRIEEARKRLEELLKEAED

SEQ ID NO: 14893 - protein, 59 aa, Artificial Sequence
  Synthetic
SREEEAKKEVKRLLDELKKLSDDSRKRIRESHERLKRVIEEVRREAERSHEELERVIRR

SEQ ID NO: 14894 - protein, 56 aa, Artificial Sequence
  Synthetic
EKDVRKVDRDVDEILKRSEDIIRKVKEDSERLLKEVRERIEEMKKRTDDLLKEAEK

SEQ ID NO: 14895 - protein, 60 aa, Artificial Sequence
  Synthetic
RKEETLKRAEEKSKETLERNKRLLERIEEESRKTLEKNKDMLRRVKKRVEDLLREIKRDK

SEQ ID NO: 14896 - protein, 56 aa, Artificial Sequence
  Synthetic
EEELRRVIEDVLRESEKLHREDEELARRVLEESERLHREDEELARRVEKEIRELKK

SEQ ID NO: 14897 - protein, 56 aa, Artificial Sequence
  Synthetic
SLDELAKKAKEDSERSVRTDEKRLEEIARRIKELIKENEDLLREVKKEIDRLIEEI

SEQ ID NO: 14898 - protein, 56 aa, Artificial Sequence
  Synthetic
EEEARKLLEDIKRRSEELHKRNDELAREVEKRIRKLIKENRELAEEVRRRIEELRR

SEQ ID NO: 14899 - protein, 56 aa, Artificial Sequence
  Synthetic
RTDETVKKIEEDSRRSLEEDRKELEEVERRSRESIKENERLLREVAERIKRLIEEI

SEQ ID NO: 14900 - protein, 56 aa, Artificial Sequence
  Synthetic
EKTLKELADRIKERSEELHRRNEKLAREVLERSKELIKRNEELARRVIEEIKKLKK

SEQ ID NO: 14901 - protein, 60 aa, Artificial Sequence
  Synthetic
DVEETLKTVEDESRKTIETLRRSLRKSEEESKRSIDRLRESLERSREEVERLLREIERDK

SEQ ID NO: 14902 - protein, 59 aa, Artificial Sequence
  Synthetic
EEAVEKLKKLAEDVRRESEELRRELEELSKDVRRVSEELERRLRKLSEEVKKRIKDLKR

SEQ ID NO: 14903 - protein, 60 aa, Artificial Sequence
  Synthetic
SVEKILRDVEDTSRRTIEELKRSLEESKKTVTKLLEENKDLLRRIKEDVRRRLEEIKRDK

SEQ ID NO: 14904 - protein, 59 aa, Artificial Sequence
  Synthetic
EEAVERLKELAEEVKRVSKELLEELRKISEEIERRIRRLIEENKELADRVREEIERLKK

SEQ ID NO: 14905 - protein, 61 aa, Artificial Sequence
  Synthetic
DKVDRVIEEARRILERLRKRVTDVVRELEEINRRLKREVDESVKEVDEILKKLEERVRKRK

SEQ ID NO: 14906 - protein, 56 aa, Artificial Sequence
  Synthetic
KELVEKLDREVKRLLKEARELSEENRRRSKKLLDELRKSSERIREKVEDLVRRIRK

SEQ ID NO: 14907 - protein, 59 aa, Artificial Sequence
  Synthetic
SEEEAAKRRIDELLKRLKEVSDKVKEDIDELLKDLERRSREVVEEIKKLLEEVKDRVRK

SEQ ID NO: 14908 - protein, 56 aa, Artificial Sequence
  Synthetic
SERLKRVTEEAKRLHEENKKLLDDVRREARRLNEDNRRLLDEVRKRVEEVLRRIRK

SEQ ID NO: 14909 - protein, 61 aa, Artificial Sequence
  Synthetic
DEDRRALEEVRRVLEEDKRVSKRSRDLIEKVLREVEELIKEVTKRAEDVLRRVREIIKTSG

SEQ ID NO: 14910 - protein, 56 aa, Artificial Sequence
  Synthetic
RELVKKVEDEIKESEDESEDLIRRADEAVKRLRKRVRDVIEKARRDLEKIVTDAKK

SEQ ID NO: 14911 - protein, 59 aa, Artificial Sequence
  Synthetic
SIEKLIEDVRREVERIEEESKKLVKKAREDVKRSHDHSKRLMEEATRRVRDILRRAEEM

SEQ ID NO: 14912 - protein, 59 aa, Artificial Sequence
  Synthetic
KELVDDARRRVEELLRRLEDSLRKSERLVRELLKRSKEVDDRIREEVKRLLEELDDRRR

SEQ ID NO: 14913 - protein, 60 aa, Artificial Sequence
  Synthetic
DTEEILKRIEEEIRRLLEENEKLLRDAEDTVRKSLEEHERILDEVTKRIRKMLEEIARTD

SEQ ID NO: 14914 - protein, 56 aa, Artificial Sequence
  Synthetic
DETLKRLAEEVLREVERLLRENERLIREVERRADKTVKDLEKLIEEVERRIDELKK

SEQ ID NO: 14915 - protein, 60 aa, Artificial Sequence
  Synthetic
DSKEIIDKVREDIKRADEENKRLLEEVRDRIRKLLEENETLLKDSERKARELLEELRRKD

SEQ ID NO: 14916 - protein, 56 aa, Artificial Sequence
  Synthetic
EEDLKRLAKEVKDRIRELLERNRELIKEVEKRVRRLLDENRKSSEEIRKEVEDRKR

SEQ ID NO: 14917 - protein, 60 aa, Artificial Sequence
  Synthetic
SDEERALKLVEDVIRDVKRLNKRDRELIEKVERDIEKLLEDHRRLVDEVRRRVKELEDKV

SEQ ID NO: 14918 - protein, 56 aa, Artificial Sequence
  Synthetic
SELLKEVEERIKKLLKSNKDLLREVEERVRRALERVKRSDEEVHKMARDALRRVRK

SEQ ID NO: 14919 - protein, 60 aa, Artificial Sequence
  Synthetic
SEDEDAERLVEEVIRRVKELLDTHKRLVEEVERKIRELDKKDAELVKEVEKRAEDLRRKV

SEQ ID NO: 14920 - protein, 56 aa, Artificial Sequence
  Synthetic
SELLERAEREIRRLLREVKESDKEVHRRVRRMLEHNKDLLRRARDSIKKVLDEIRR

SEQ ID NO: 14921 - protein, 60 aa, Artificial Sequence
  Synthetic
SEREDAERVIERVEREIRELNRRDEELIRRVEKEIRRMLEEHKTLVKEVTRELDRLRREV

SEQ ID NO: 14922 - protein, 56 aa, Artificial Sequence
  Synthetic
SEDLKRVDKKVRDVLRSNKELLDEARKRITKVLEEVRRSDEEVKRRAEKVLDEVRK

SEQ ID NO: 14923 - protein, 60 aa, Artificial Sequence
  Synthetic
SEEEDAERAVREAAELAKKANKEDEELARRAAELAKKALREHEELVERAARLADEAEKKA

SEQ ID NO: 14924 - protein, 56 aa, Artificial Sequence
  Synthetic
SERAKKAEDDARKAAEDNRRLAKRAKEEARRAAEEVKKSDKEAEERARRAAERVRR

SEQ ID NO: 14925 - protein, 56 aa, Artificial Sequence
  Synthetic
SLERLLEEVTRRSEETVRTNEEILRRAADEVRKAIESNKDLLRKIKKEVDDVKRRL

SEQ ID NO: 14926 - protein, 56 aa, Artificial Sequence
  Synthetic
EESVRTIIEEVERTSREMNERLKKIIDEVRRTIEELNKDLKRILEEIRELVKRLET

SEQ ID NO: 14927 - protein, 56 aa, Artificial Sequence
  Synthetic
SLEETLEEVDRKSKETVKRLKELLDRIRERVEEAIKSNEDILRRIKAEAEEAERRL

SEQ ID NO: 14928 - protein, 56 aa, Artificial Sequence
  Synthetic
ESEVERIIRELERVSRELMELLKKILEEVRKRIKELNDRLEEILRRVRKRIRELEQ

SEQ ID NO: 14929 - protein, 56 aa, Artificial Sequence
  Synthetic
SLEELLERIKRDSDRTVRELEELLERAEEISRRTEKSNEDSLRRSTKEVKEAEDRL

SEQ ID NO: 14930 - protein, 56 aa, Artificial Sequence
  Synthetic
EEVVKKMLDELRDRSEKLLRTLRDIIRRAKERSDDLNRKNKESTEKVREDIRRLEQ

SEQ ID NO: 14931 - protein, 56 aa, Artificial Sequence
  Synthetic
KLEELLKRIAEESKKTVEELEKLLEEVERISKKTVEELEDSLRRSEEDAKEAEERL

SEQ ID NO: 14932 - protein, 56 aa, Artificial Sequence
  Synthetic
EDDVRRILEEVRRLSEELKTRLRKILEDLRRLSEKLKRENEESTKTVRKVIEDLER

SEQ ID NO: 14933 - protein, 56 aa, Artificial Sequence
  Synthetic
SLEELLKRIKERSEETVKRLEDLLKRVREDIDRAIKELKKSLDDSRKTVEDIEREI

SEQ ID NO: 14934 - protein, 56 aa, Artificial Sequence
  Synthetic
EEKVKEIAEEVRRRSEKMLEELKKLVDEVRKRLEDLRKRNEDSTEEMKKRVEEEKR

SEQ ID NO: 14935 - protein, 57 aa, Artificial Sequence
  Synthetic
SEVEKVIKDNKRSVDEIRKTLKRVLERNEKTLRENEKKIRDIIAEVDKRLKDLEREI

SEQ ID NO: 14936 - protein, 59 aa, Artificial Sequence
  Synthetic
DKAIKEIEEEVRRVDDRVRKLVEKLDRDIKEVDDRSRKLTDDLRRKVEEVLRRIKETVT

SEQ ID NO: 14937 - protein, 55 aa, Artificial Sequence
  Synthetic
REVEEIEKELRKIIRDLKELLRELRERLEKLDRDLKDLLRRLREENREILDRLRK

SEQ ID NO: 14938 - protein, 55 aa, Artificial Sequence
  Synthetic
EKVIRDADRMAKELKKDLRKVLEDNRRTVEKLKRDLEEVDKESDEEARKLREEIR

SEQ ID NO: 14939 - protein, 63 aa, Artificial Sequence
  Synthetic
SESEKIEREIRKLIDDSRKNSERIRREIEKLIRDSEETSKEIKKEIEDLLRELKEMLDEIKKR

SEQ ID NO: 14940 - protein, 55 aa, Artificial Sequence
  Synthetic
EEVLRRAKKALEEDKKRNDEVLDEVRKALEEDKKRNDKVLEDARRVIKKIKDELK

SEQ ID NO: 14941 - protein, 63 aa, Artificial Sequence
  Synthetic
KDEETIRRRIEELLKRSEDNSERIRRTIRELLERSKKLSEEVRKRIEELLKRLDEKVKEIRKR

SEQ ID NO: 14942 - protein, 55 aa, Artificial Sequence
  Synthetic
EEVLKEAEKRLREDKKRNDEVLKRVTEAVEEDKKRNDDVLEKVERAIREIARKLD

SEQ ID NO: 14943 - protein, 60 aa, Artificial Sequence
  Synthetic
SEEEKVIRDLERLLEENEEHSRDVERKLRESDKRLREMVKKVSDEIRKLDEEVEELLRRG

SEQ ID NO: 14944 - protein, 55 aa, Artificial Sequence
  Synthetic
EDALRRVKEALERSKKRLDKVLKDHEDSVRELKKEIDDVLKRNEETVREIEKRAR

SEQ ID NO: 14945 - protein, 60 aa, Artificial Sequence
  Synthetic
EEVERVKRELERLLEENDEHSKEVEKRIRDLDRKAEELLREIEERLRRSDERLKRLLERG

SEQ ID NO: 14946 - protein, 55 aa, Artificial Sequence
  Synthetic
ERVLKKVEDDLRESEKRVEEVLRKNEETVRRLKEELRKVLEDHKRTVEELRRRLT

SEQ ID NO: 14947 - protein, 60 aa, Artificial Sequence
  Synthetic
SREEEVEKRIREVLKRLEELLADVERRARELNRRLEKVVRDVKKEIEDLDRKLRKLLKDG

SEQ ID NO: 14948 - protein, 55 aa, Artificial Sequence
  Synthetic
EKVLKDVTDMARELERRLEEVLRKHRKSSEDLKRRIDEVLKRNEETLREIDRRLN

SEQ ID NO: 14949 - protein, 60 aa, Artificial Sequence
  Synthetic
SEREKAKRELERLLEEDRKHLKDVERELKELDEEDERHLREVEKELKELDDRAKEALDRR

SEQ ID NO: 14950 - protein, 55 aa, Artificial Sequence
  Synthetic
EEVLKEVKRLSEKSKTDLEKIVRDNKRSSDDSRRELERVIRENEETLRRLAERIK

SEQ ID NO: 14951 - protein, 60 aa, Artificial Sequence
  Synthetic
KEEEEAKKELDDLLRRLKDLYRRIREELERLDRRLEEAYRRIKEDLKRLDEELRRLLEKD

SEQ ID NO: 14952 - protein, 55 aa, Artificial Sequence
  Synthetic
EKVIRDVRKASRDTEREIRKVAEDNRKSSEDSRRKLEDVLRKNKETLDRLRDELR

SEQ ID NO: 14953 - protein, 60 aa, Artificial Sequence
  Synthetic
DEKETVEEELRRLLEELKKHIEDTERKLRKLDTDLEDVYRRIEEELRRLLEELKKMLDDR

SEQ ID NO: 14954 - protein, 55 aa, Artificial Sequence
  Synthetic
EKVLRDVEEALRRAKKRSDDVVRENEKSSRRSEERLERVLRDAKRVLKELKERID

SEQ ID NO: 14955 - protein, 61 aa, Artificial Sequence
  Synthetic
SELEEVLKRVAEVVERVSREDEKVNRKNDAAVKKVTKDDRKVLEDLERKLRELEKDAKDRG

SEQ ID NO: 14956 - protein, 59 aa, Artificial Sequence
  Synthetic
EDVIRRLEKEVRDVLKDWEEKSKEAEEKNKTVNKRWEDESRRLKKKVDRLIEKIKEDLR

SEQ ID NO: 14957 - protein, 60 aa, Artificial Sequence
  Synthetic
RSEELLREIEERIKRLKEKNEELVKEIRRRARELEREDDRAKKEIDDLARKVEEKIRRTI

SEQ ID NO: 14958 - protein, 55 aa, Artificial Sequence
  Synthetic
DDVVREVRKLIEELDRHLERLVEEVRRVVKELLEISKEILDRVREVITRLREEVK

SEQ ID NO: 14959 - protein, 59 aa, Artificial Sequence
  Synthetic
SEVEDAVRKIRELAKEIARAIDELLKEHEELIRTVADALEKLVRTSDKLAEDIARVIDG

SEQ ID NO: 14960 - protein, 56 aa, Artificial Sequence
  Synthetic
RELLEELKRILEDLERRAKEIVDRARELNKRAEDEIRRLIEDSKRKLEEIRKRIEE

SEQ ID NO: 14961 - protein, 59 aa, Artificial Sequence
  Synthetic
KEAEEAVKRLRDLVRRVEEETKRLLRESRESLKTLEEITDRLLKRSEESVKEIEKVITR

SEQ ID NO: 14962 - protein, 56 aa, Artificial Sequence
  Synthetic
RELLTEVTKLIKDHHDKVREILRESDKELDRHHKDVERILERSKRELERLEDEVRR

SEQ ID NO: 14963 - protein, 57 aa, Artificial Sequence
  Synthetic
SREELLKEIKKKIDDIKRENEKLLRDIERLIRELEKRDKELLDEARKTSEELVRRAG

SEQ ID NO: 14964 - protein, 55 aa, Artificial Sequence
  Synthetic
RDVVRDVDRILTEWKKESEDLVEEVKELIKRWKDTSEELVRRVRELNERIDRETR

SEQ ID NO: 14965 - protein, 60 aa, Artificial Sequence
  Synthetic
SEVETVEEKVKKVIEDLRRLLKEVRDRNRRIIEEIKRLLERVAEKNKRIVDEIRDLLRRR

SEQ ID NO: 14966 - protein, 56 aa, Artificial Sequence
  Synthetic
EDIIRRIDELFREILKEVKRLNEESKRRLEKLEEDIKRLDDRSREEAEKLRDAVRR

SEQ ID NO: 14967 - protein, 60 aa, Artificial Sequence
  Synthetic
SEVEKVARDVEEVIRTSEDKTRKLEKRNKDIIREIKKLLDDLARENKRIADEIKRKLDER

SEQ ID NO: 14968 - protein, 56 aa, Artificial Sequence
  Synthetic
KRLIDEIRREMERSHRRDEEVNEKSKREADKLRRDVEKLDEDSARELKKLEDEVRT

SEQ ID NO: 14969 - protein, 60 aa, Artificial Sequence
  Synthetic
SEVERVERELDKVITDLRRLLDDLKRKNEELVRRIRELLKKVKERNKKIVTEIDDLLRRR

SEQ ID NO: 14970 - protein, 56 aa, Artificial Sequence
  Synthetic
ERIIRRIKELADRIEERVKELNERVREEVRKLEEDIKKLDDESREEARKLEDKVRQ

SEQ ID NO: 14971 - protein, 60 aa, Artificial Sequence
  Synthetic
SSEEIRREIERESEDTRRRLDRVLEDIERLSRETKEHIKESLERVRREHDRLRRELERKA

SEQ ID NO: 14972 - protein, 55 aa, Artificial Sequence
  Synthetic
EEVRREVRKLIEESRRAIDEVKRRVEELIKESRDRNRRIEERVKELVKENAERIR

SEQ ID NO: 14973 - protein, 60 aa, Artificial Sequence
  Synthetic
KSEEIRRKIEEDSRRTKKELDDILDEIRKLAEKVKKEIEELLRKVRRRHEDMKRRLREKV

SEQ ID NO: 14974 - protein, 55 aa, Artificial Sequence
  Synthetic
EEVAKEVKKLIEESRKLLEELKDTVRRLIKRLKELLEELERRVEELIKENEERIR

SEQ ID NO: 14975 - protein, 60 aa, Artificial Sequence
  Synthetic
RSEDILREIEDLSRETKEKIDEILERIRKLAEEVKRHIDESLKEVRRRHEEADRELDEKM

SEQ ID NO: 14976 - protein, 55 aa, Artificial Sequence
  Synthetic
EEVAKEVRDLIRRSEDLLRRILETVDKLIKELRKLNEDILERVRKLIKKNKDDIK

SEQ ID NO: 14977 - protein, 60 aa, Artificial Sequence
  Synthetic
KSEEIERRIRERSRETRRELEEVDKKVKKRHTELREHLKRSLKKVKEDHDDLKRKLEEKI

SEQ ID NO: 14978 - protein, 55 aa, Artificial Sequence
  Synthetic
EEVEEEVKRLIEESKELIKRLEEEVDKLIRDNKKLNDDILRRVKRLAEENDERIR

SEQ ID NO: 14979 - protein, 60 aa, Artificial Sequence
  Synthetic
SSEDILRDIERIARKLREDLKRVLKRVKELSDDTRREIERLVEEVERIHERLRRELERKV

SEQ ID NO: 14980 - protein, 55 aa, Artificial Sequence
  Synthetic
ERVADEVRKLIAELEKLIRDLKRRVDELIRRSRELLERIRDRVRKLIEENKRAID

SEQ ID NO: 14981 - protein, 59 aa, Artificial Sequence
  Synthetic
SKVEEAKREVDRVIKELREDIKRVEEEVDKLIKDHEKLNKELEDESRKLAERVEKLRRD

SEQ ID NO: 14982 - protein, 56 aa, Artificial Sequence
  Synthetic
EKIVRDIKELLRDLRREVEKVIERIDRLIKRLEEESRRLFEESEKAIRELKRRVDK

SEQ ID NO: 14983 - protein, 59 aa, Artificial Sequence
  Synthetic
KKVEEAKKEVKEMIRRHRERNKEVEKEVKDLARKHEKENRDVAETSKRLAEKVKKLRDD

SEQ ID NO: 14984 - protein, 56 aa, Artificial Sequence
  Synthetic
EEIVKDIKREIEELEDESRRILEEIREDIDRLRRRSEKLFEDSRELIERMKREVDR

SEQ ID NO: 14985 - protein, 60 aa, Artificial Sequence
  Synthetic
DEIEKVRKRAEDLNREDKRLSERAFEESKEVVEEHRRLSDRARRESDRVVEEVEKTLKDK

SEQ ID NO: 14986 - protein, 56 aa, Artificial Sequence
  Synthetic
RKILEEIRKAIDRNRDENRRLVEESKKELDELRKEDEELVERSKRKLEELDRRAKK

SEQ ID NO: 14987 - protein, 60 aa, Artificial Sequence
  Synthetic
SRIETVKDELRRIAEDVRRALEEIEERLKDLNRRDEELTKRIEDTSRDILRRVEEVLRRN

SEQ ID NO: 14988 - protein, 56 aa, Artificial Sequence
  Synthetic
EKILKEVADRLRELKRRAERLIEEVTRLLKENEKRNKEVVDTSREALREIRDRVRK

SEQ ID NO: 14989 - protein, 57 aa, Artificial Sequence
  Synthetic
SKEDILREIEKRIRKIEKEAEELLRESRKILEELEERDRRLLERVKREIDRLLEETG

SEQ ID NO: 14990 - protein, 59 aa, Artificial Sequence
  Synthetic
EELLRRVERELKKLIDEVRKVLKDNFDRNRELAKEWEDLSRELFKRAKELIEKVEEASR

SEQ ID NO: 14991 - protein, 57 aa, Artificial Sequence
  Synthetic
SKEDILREIKKRIEEIERDARRLLEESKRILDELRKTDEKLLRESEERVEELERKSG

SEQ ID NO: 14992 - protein, 59 aa, Artificial Sequence
  Synthetic
EELLKRVMEELRELIERVERELRRNARENRELARKWKKLSEENKKKNDDLIREVDEASR

SEQ ID NO: 14993 - protein, 60 aa, Artificial Sequence
  Synthetic
DEKERIEEEIRRILEELERKVDEAREEIKRMDEELKRRIEEIARRSRELDDELRERVDKD

SEQ ID NO: 14994 - protein, 55 aa, Artificial Sequence
  Synthetic
EEVRKEAERVLRKIEEDIDRVLRENEDSVRKLRTEIDRVEEENRRSAKRIRERLK

SEQ ID NO: 14995 - protein, 59 aa, Artificial Sequence
  Synthetic
DEVRDVVTRIRDLLRRIKERLEELTERIRRLLEKIHKTTEDLARRNRKLIDEIRKEIDK

SEQ ID NO: 14996 - protein, 55 aa, Artificial Sequence
  Synthetic
EDVKREVKELLDKIREDLERVREEAKRSNEENRKRLEEVVEESERLLEELKRRST

SEQ ID NO: 14997 - protein, 55 aa, Artificial Sequence
  Synthetic
DEVREVLKELKKVLREIEKAVRDVLEEDREMHERIARKVKKVLDENKKSLDDLRR

SEQ ID NO: 14998 - protein, 59 aa, Artificial Sequence
  Synthetic
EKKLKEIADKIRELLERLKDRLEKIAREIRDVNRKLDEDLEDIVRRIRDVDKKLDDKTK

SEQ ID NO: 14999 - protein, 63 aa, Artificial Sequence
  Synthetic
SVLEEIEREVEEIRRRIEKVLKELNDDDRRVIEDSKRLNEKLEKEVRDIERKARDLLRKLKDT

SEQ ID NO: 15000 - protein, 59 aa, Artificial Sequence
  Synthetic
REELEKLKRRLDEELDRVREKVEENIRRTDKAVEDSERENERLKRELDEKVKRIRDELR

SEQ ID NO: 15001 - protein, 55 aa, Artificial Sequence
  Synthetic
SDEEDVERLVKELIDRVRKTDAELERKVDEVIRELKEVIKRIEDHSRDSIRKLRN

SEQ ID NO: 15002 - protein, 55 aa, Artificial Sequence
  Synthetic
RELIKRLRDAVRESEKENKRINERLRRVIEKAKRDLEKILEEDRRVLEEMAERAK

SEQ ID NO: 15003 - protein, 56 aa, Artificial Sequence
  Synthetic
SEVETIKREIDKLMKELTEKIKRIKEEDDKVHEELKRAVDRSRERLEEVLKELRDR

SEQ ID NO: 15004 - protein, 59 aa, Artificial Sequence
  Synthetic
EKEIRDLMREIREVAERAKKRVDELLERIRRINTKLKEELKELHKRTEDLIKKAKEEVN

SEQ ID NO: 15005 - protein, 56 aa, Artificial Sequence
  Synthetic
KEVEEIDERLKRVLEELRRMLEESRKEDERVHDELRKEAEKIKRELDKAVEELRAR

SEQ ID NO: 15006 - protein, 59 aa, Artificial Sequence
  Synthetic
KKVIDDLLRKIEKLIREMKKRLKDLHEETKRINEELERRLRDLERRVRDLLRRAREEAN

SEQ ID NO: 15007 - protein, 56 aa, Artificial Sequence
  Synthetic
SEIERIKEEDEEVHKRLKEINDRINKEDKDVHDKLRDEARKIEERLRRVMEELRAN

SEQ ID NO: 15008 - protein, 59 aa, Artificial Sequence
  Synthetic
EKVIRKLLEEIRRINEELERRNRKLMKDIREINERAEEKLRRLAEEIEELIKKLKEEVK

SEQ ID NO: 15009 - protein, 56 aa, Artificial Sequence
  Synthetic
SEVEEIKREDDKVHEDLKKAADDIRKRDEDVNRKLTEAIEEIRREVDKALEDLERR

SEQ ID NO: 15010 - protein, 59 aa, Artificial Sequence
  Synthetic
EEVIRRLMEKIRRINAELRKALKRLLEEIEDINRKLEEEVKKILEEIRRVLEELRRRAN

SEQ ID NO: 15011 - protein, 61 aa, Artificial Sequence
  Synthetic
SEVEELVKELRRLIEEWDRRSKRLMEELKELAERIDKTTKELLKELEDLVEKIKRELDKKG

SEQ ID NO: 15012 - protein, 55 aa, Artificial Sequence
  Synthetic
ERVAEEVKRAIERAKRESDKIERDVRELNRRNREILKKIKKRVEDVLRKLRKDLE

SEQ ID NO: 15013 - protein, 59 aa, Artificial Sequence
  Synthetic
DEVEELKERLRRLAETIARRIRELVERLRDSARKIEKRVRELAKKLRDSVREITKVIKD

SEQ ID NO: 15014 - protein, 55 aa, Artificial Sequence
  Synthetic
EEIREEVEKAVRDLEELLKELKRESEETIRRIEKLVRDLERESEEAVRRLKEEKD

SEQ ID NO: 15015 - protein, 59 aa, Artificial Sequence
  Synthetic
SEEEKLKKELEDLARRIEKRLRELVEELERSVREIERRIEKLHKELEESVDRIKKVVDK

SEQ ID NO: 15016 - protein, 55 aa, Artificial Sequence
  Synthetic
DEIRRRVEEVVRRLEKIVKELEERSREVLKRLREEIEKHKKRSEETKERIRTRAT

SEQ ID NO: 15017 - protein, 59 aa, Artificial Sequence
  Synthetic
SEVEELLKRLEDLIRKIEERLKELVKRLKESAKEIEERLEELHRRLKESVDRIREEIEK

SEQ ID NO: 15018 - protein, 55 aa, Artificial Sequence
  Synthetic
EEIKKEVKKALERLKKIVEDAKKVSEETMERIRKLVEEHKDTSRKTVEDLERATK

SEQ ID NO: 15019 - protein, 59 aa, Artificial Sequence
  Synthetic
DEVERLMEELRRLLEEVRKRIEDLIRENRKLVKEIKDRLEKLLRDNERLAREIEEVIRS

SEQ ID NO: 15020 - protein, 55 aa, Artificial Sequence
  Synthetic
ERIREEVKRAIEKLKELVEDSNREVTEALKEIEDLLRKLKERSEELLRRIKARTD

SEQ ID NO: 15021 - protein, 60 aa, Artificial Sequence
  Synthetic
KEVDELDEELKKHAERIDRELERLDRENEKHVEDVRRELERLREENERHARRIEDEVKKR

SEQ ID NO: 15022 - protein, 59 aa, Artificial Sequence
  Synthetic
RKTLEDIRRKVEKSLRELEKKLEEIDKKNRDTLEEARRELERIRRENEEVIRRLDKRRR

SEQ ID NO: 15023 - protein, 60 aa, Artificial Sequence
  Synthetic
KEVEELVRKLREHVRDIKRKLEELLKENEDHARRAEDRLRELTKENRDHVKEMEDVLRRD

SEQ ID NO: 15024 - protein, 59 aa, Artificial Sequence
  Synthetic
KDTLERLEREVRKSIKELEDKLREIRKRNKEVIDKLRDILEKIKKENREALKRLRDTEE

SEQ ID NO: 15025 - protein, 60 aa, Artificial Sequence
  Synthetic
SEVEKLTEELRRHVEEIERDLDRLRKENERHAKKIKDELKRLLEELEEVARRIEAELERD

SEQ ID NO: 15026 - protein, 59 aa, Artificial Sequence
  Synthetic
KDMLRRIEEEVERSIRRLEELLERIRERNEKVIEDLKELLKRIRDRAEEVKDRLRRTRK

SEQ ID NO: 15027 - protein, 60 aa, Artificial Sequence
  Synthetic
SEVEKLKKELEDHVRDIEKKLRDLMRENEEHAKRARERLKKLLEDNEENVKDIEDKVRKK

SEQ ID NO: 15028 - protein, 59 aa, Artificial Sequence
  Synthetic
EDTLRKIREDAKRSEKKLEEILRTIRKRNEKVIRDLRRLLEELRKRNREAIERLRKELE

SEQ ID NO: 15029 - protein, 60 aa, Artificial Sequence
  Synthetic
SEVERLAEELRKHVEEIKKELRKLKEKLEKLARDIERELKRLRDENKKHADDIRDKVEKR

SEQ ID NO: 15030 - protein, 59 aa, Artificial Sequence
  Synthetic
KDTLRRIEEEVKKSERELREELKRLEERVRRVIEKLEDLLRRIEKENEEVKRDLERRRK

SEQ ID NO: 15031 - protein, 60 aa, Artificial Sequence
  Synthetic
SEVDELKRRLDEHAKDIRDKLRKLVKELREHAKRAEDELRRLLKENEDNAREIRELVKTL

SEQ ID NO: 15032 - protein, 59 aa, Artificial Sequence
  Synthetic
EKTLRDIKRAVEKSIRDLERILEELRKEVEDTIKRLEDILREIRKRNKDVIDDLRRRMK

SEQ ID NO: 15033 - protein, 60 aa, Artificial Sequence
  Synthetic
SEVDRLVRELDKHVEDIERTLKKLREENEKNVEEIKRTLKKLVDELRKLAREIIDTVDKN

SEQ ID NO: 15034 - protein, 59 aa, Artificial Sequence
  Synthetic
EKTLRDIKRRVDKSLEDLKRTLEEIKRENERTLEEIKKILEDMEREVRDIERKLREKEK

SEQ ID NO: 15035 - protein, 60 aa, Artificial Sequence
  Synthetic
KEVEDLVRELEKLIEEIKRRLEELDKELKKHVEDAERRIKKLLDENRENAERILEKLRRD

SEQ ID NO: 15036 - protein, 59 aa, Artificial Sequence
  Synthetic
EELLRRAKERVREALEDLRRILEEIRRKVEETIRRLEKLLKELRDRNRRVLEELERTLK

SEQ ID NO: 15037 - protein, 60 aa, Artificial Sequence
  Synthetic
REKEEIKREVEEAKKRLEDLLREIAEEVKRALERLRELNERNNDRARRVLKRLTDELRRV

SEQ ID NO: 15038 - protein, 55 aa, Artificial Sequence
  Synthetic
DRLSERLRRLVREIEETLKELLKALRRLLERIREVSEELHRRSEELVERILRKLK

SEQ ID NO: 15039 - protein, 60 aa, Artificial Sequence
  Synthetic
REKEDIEEKVKRVLERLERLNRENNKESERLLRRLEELNKRNNEAVKELLDRLREILKRV

SEQ ID NO: 15040 - protein, 55 aa, Artificial Sequence
  Synthetic
DRLMEELKRLAREAERVSEELHDRTRRLAEEIEKVSKELHKKSEKLAREIKKRLD

SEQ ID NO: 15041 - protein, 60 aa, Artificial Sequence
  Synthetic
KEAEELIKELKDLAERIRRENRRLLEELKKLVEEIRRRIRELIERSEDSVRKIEETVKRK

SEQ ID NO: 15042 - protein, 55 aa, Artificial Sequence
  Synthetic
EKAERELKKISEDDERSIKELEDLLRKVEEDIRRLLDELRDIMKKTKEKVDELRR

SEQ ID NO: 15043 - protein, 60 aa, Artificial Sequence
  Synthetic
DEAERVKRELERLVKEIKEENRRLLRELRELSKRSREVLERLLRKLEDLVRKIREVLERL

SEQ ID NO: 15044 - protein, 59 aa, Artificial Sequence
  Synthetic
KKVLDEIEKEAEEIKRENKDFNRRIEREVRESKREIEEVVKRIREIAERVDRDIDRTRR

SEQ ID NO: 15045 - protein, 60 aa, Artificial Sequence
  Synthetic
DEEREVKERLRDLTRRIRETIKRLLDKNKDLARRIREVNKETSEELERLARDIERVLEEL

SEQ ID NO: 15046 - protein, 59 aa, Artificial Sequence
  Synthetic
KKVLDEIREAAERVKREIEELLKEVHRINTELNKDNTELNKRNREIVERVKRRIDERAR

SEQ ID NO: 15047 - protein, 60 aa, Artificial Sequence
  Synthetic
DEVEEVKKALEDLAEKIRDLNRKILEKNKKLADDIRRLNEKLLRELRKLVEEIERVLRKL

SEQ ID NO: 15048 - protein, 59 aa, Artificial Sequence
  Synthetic
KELLDEIRRRVEEVKKDNERVNKEIEELNRKLDEDNERANREIRDTVEKVRRRIDEEEK

SEQ ID NO: 15049 - protein, 61 aa, Artificial Sequence
  Synthetic
SEIEEIEKEIRRVLEEIERLLRTLKKINDDVKRESEKLVRDDKKKIDDALRELRKLAAERG

SEQ ID NO: 15050 - protein, 59 aa, Artificial Sequence
  Synthetic
DEVVRRAEKLLKEIRDTVETALKELEDKNERSERENKRVAEESERKLRKIKEEVDKAAE

SEQ ID NO: 15051 - protein, 60 aa, Artificial Sequence
  Synthetic
RKVEEIKKRLKELKERLEESVKRIKDRLRKLEEDNRRLAEEVKKRLEELLKRLEDLVKRR

SEQ ID NO: 15052 - protein, 59 aa, Artificial Sequence
  Synthetic
EKAVKELEDELRRIEKTSRDVLKELEDILRRLREESKRVADELRELLRRVKEKVERETK

SEQ ID NO: 15053 - protein, 60 aa, Artificial Sequence
  Synthetic
SEDDRIRERLKELVDRNDELVKRIKRALDELLRELRKSVEDIKRTLDDLARKLEELARRR

SEQ ID NO: 15054 - protein, 59 aa, Artificial Sequence
  Synthetic
REVVEDLKRILRELEKRSEDVLRELKKKLDDVEKESRDVLRELTEKLKKIEEDVRRAEK

SEQ ID NO: 15055 - protein, 60 aa, Artificial Sequence
  Synthetic
REVEEIERRIRELLETNREIAERTTEEIKRLKKELEDSLEEIKKRLKELVDELRKLATDR

SEQ ID NO: 15056 - protein, 59 aa, Artificial Sequence
  Synthetic
EEAVRRLEELVREIEDRSERLNKENEDELKKIEETSRKALKELEDRLREVKKEVREAER

SEQ ID NO: 15057 - protein, 57 aa, Artificial Sequence
  Synthetic
DSDRELEKKIRDSLKRLEEALRELEERLKRSLEDDERVHEELRRRAERIRETIKKRL

SEQ ID NO: 15058 - protein, 59 aa, Artificial Sequence
  Synthetic
SELVKRMKERVDELHKRTEELLERLKEELKKLHDETRDINRELKKRLEDLERKIEEAAK

SEQ ID NO: 15059 - protein, 57 aa, Artificial Sequence
  Synthetic
KEAEELRRLIEESKRTDKKVHEDLKEEVRKIEEEDDKAHEELRKEVERIKKKIDDDM

SEQ ID NO: 15060 - protein, 59 aa, Artificial Sequence
  Synthetic
SELIKRLKDEVKKLHDETERINRELKKELDDLLRRVRKINKELKEELKKLERKIEEAAR

SEQ ID NO: 15061 - protein, 57 aa, Artificial Sequence
  Synthetic
SSREELEKRIRESEKRDREMHERLRRTAEKIEKEDKEMHDRLREKAERIEERIDKEV

SEQ ID NO: 15062 - protein, 59 aa, Artificial Sequence
  Synthetic
SELIERIAERIERLNRDTERINRELEEKLRRLLKRIREINTELDKRLKELLDRIEEASR

SEQ ID NO: 15063 - protein, 57 aa, Artificial Sequence
  Synthetic
SSEEKIEKASEDNERKVKEVLREIEELSKKDKTDVERVLRELEKRLEEIKREVDRRD

SEQ ID NO: 15064 - protein, 56 aa, Artificial Sequence
  Synthetic
EEDLKRELDEIDKRTEELARELRELMREIHERTKRLADDLRRAIDEIRKKIEEDAR

SEQ ID NO: 15065 - protein, 59 aa, Artificial Sequence
  Synthetic
DELEDLLRRHRELVKRSLERLKDLLERNRELIEDSERRAEELLRELRRLIEEIKKVLDE

SEQ ID NO: 15066 - protein, 59 aa, Artificial Sequence
  Synthetic
KKVLEELKRSNDEANERHKTVLRRLEEENKRANDSHRKIKEELKDLLRRVDETVKEKRR

SEQ ID NO: 15067 - protein, 59 aa, Artificial Sequence
  Synthetic
SRLEELLKTHKKLVEDSVDEVRRLLERNRKLIEDSKERLKELLRTNEELIRTLKEVLDR

SEQ ID NO: 15068 - protein, 59 aa, Artificial Sequence
  Synthetic
EEVLRRLKESNKKANEDHRRLNEENKDLNRRANEEHKKVNDRNKELLDRARRTADEKRR

SEQ ID NO: 15069 - protein, 59 aa, Artificial Sequence
  Synthetic
DEVDELVKTHERLVEESERRIEELLERNRRLIERITERAKELLKENKRLIEEITEVLKR

SEQ ID NO: 15070 - protein, 59 aa, Artificial Sequence
  Synthetic
KDVLERLKDSNRKANERHKRMNEENKRLLEDVERRIKELNKRNEDLLREAEKRVRDERR

SEQ ID NO: 15071 - protein, 60 aa, Artificial Sequence
  Synthetic
SELEELLKTHKKLVEDSVERVRDLLRENKRLIEESEKEIRKLLDELRELIERIIELVERG

SEQ ID NO: 15072 - protein, 59 aa, Artificial Sequence
  Synthetic
KEVLERLKKSNKEANDEHRRLNDENRELNERANRKHKEVEDRLKDLLRRAEEKLTEDAK

SEQ ID NO: 15073 - protein, 60 aa, Artificial Sequence
  Synthetic
DEVERLITKHRKLVEDSRRRVEELLRRNAELIKTSKRRVEELLERNRRLAEELRRLLKEG

SEQ ID NO: 15074 - protein, 59 aa, Artificial Sequence
  Synthetic
DEVLRRVEDSNRRANETHKDLNRKNKELNEEANRTHEELLRRNEKLLREIEDTVDRETK

SEQ ID NO: 15075 - protein, 60 aa, Artificial Sequence
  Synthetic
SEVEKLLKELEDESRKSEDDNRRLLEELRRLSEESLRDLRRLLEDLKRLAEEIEREVRKR

SEQ ID NO: 15076 - protein, 59 aa, Artificial Sequence
  Synthetic
DELKKRVDEVLETSRELLRESKRKIEEIARRSEEELKRVKDEVDDTARRIKRKIEEAEK

SEQ ID NO: 15077 - protein, 57 aa, Artificial Sequence
  Synthetic
DSERRLDEILERAREVNEESSRRLDKLLRETEEKNRKSTEELRKIVEDLKRTVKDES

SEQ ID NO: 15078 - protein, 56 aa, Artificial Sequence
  Synthetic
AETVIRRIEKLLEDLKRVDDKILEEHKDLSKKLDDVDREIKERIKKLIKDLKDTAR

SEQ ID NO: 15079 - protein, 57 aa, Artificial Sequence
  Synthetic
DSEEELKDILRKAKEDNDRSSDKLRRLLEETEKRNRDSTKRLEELLEETEREVRRRS

SEQ ID NO: 15080 - protein, 56 aa, Artificial Sequence
  Synthetic
AETVKERIKKLLKDLREVDREILERHKKMSDDLKRVDEEISKTHKELSRRLKETAR

SEQ ID NO: 15081 - protein, 57 aa, Artificial Sequence
  Synthetic
SKEEDLKRILEEAEKTNKESSDRLRELMDRTRRENEESSRTLKEIVKDADRRVAEII

SEQ ID NO: 15082 - protein, 56 aa, Artificial Sequence
  Synthetic
VERVKEDIERLLDELRKVDREILETHKKLSEELRRVDEEIIKRVKDLIRTLEKAAE

SEQ ID NO: 15083 - protein, 57 aa, Artificial Sequence
  Synthetic
SSEERLRTILREIEKTNRDSSKRLRDLLRETKRENKESSDELRKLLEETRDEVEKRR

SEQ ID NO: 15084 - protein, 56 aa, Artificial Sequence
  Synthetic
SDTVAERIRRLLEELKRVDEEILKTHKDLSDRLRELDEEIKKTHEKLSEELRRAAN

SEQ ID NO: 15085 - protein, 60 aa, Artificial Sequence
  Synthetic
KEVEEILETHKEIARELREVAEEIIRDHERILRDLEKKIRELRRTHERMVEELDRVAKEG

SEQ ID NO: 15086 - protein, 59 aa, Artificial Sequence
  Synthetic
KDALDKLRDSDRRVHEDVRRMLKRLDDSDKRVHDRVRKVLEDLKRSNDELRRTVEERER

SEQ ID NO: 15087 - protein, 60 aa, Artificial Sequence
  Synthetic
SEVEKILEDHKRIVDELEKEAKKIEETHTELVKRLREEVEKLKEELRRLLEELKDMARRG

SEQ ID NO: 15088 - protein, 59 aa, Artificial Sequence
  Synthetic
EEALRRLKKSDEEVHRRVREILKRLEKSNRDLNDDSRKVEEELKRILRRIEEEAKRTED

SEQ ID NO: 15089 - protein, 61 aa, Artificial Sequence
  Synthetic
SEAERLLDELRRLLEEIKRRIEELLEESKRSLEEVEKRSKELLDRLEDLLRKIKEEIRKDG

SEQ ID NO: 15090 - protein, 59 aa, Artificial Sequence
  Synthetic
EEVKERLERLRERIKREIDRVIRELRELDKRAKEVSKRTKEELEKILEKVRRVIEEVKR

SEQ ID NO: 15091 - protein, 61 aa, Artificial Sequence
  Synthetic
DDVDRLLDELRELIDRIRKDLERLLKESRDSLEELRRRSEELLKKLEEEIREVVERIRREG

SEQ ID NO: 15092 - protein, 59 aa, Artificial Sequence
  Synthetic
DELKRRAEKLLEDLRRVIEEIKRRLDKVNDEVREVSKETTDRLDDLVRKARELIRRVEK

SEQ ID NO: 15093 - protein, 61 aa, Artificial Sequence
  Synthetic
SEREKLLTDLRDLLKKVVDTLRRLNEELKKSIEESKETLERLNRTLKKLLDEVKKKLEDDG

SEQ ID NO: 15094 - protein, 55 aa, Artificial Sequence
  Synthetic
DELRKIVEEIRTELDRVRETNERILKEVRDEHRRVDKTNTDIERDIERVIKEVET

SEQ ID NO: 15095 - protein, 61 aa, Artificial Sequence
  Synthetic
KKDEDLKKLLKDNEDVMKKAADEVKRLNDENRDLMRRVAEKIEDLLRRLEKLLRDILRRRG

SEQ ID NO: 15096 - protein, 56 aa, Artificial Sequence
  Synthetic
SKTVKDRIKRLTDELERVNRELSEEHKRVLDELRKRNKEILDRLKELLKRLKEEAD

SEQ ID NO: 15097 - protein, 60 aa, Artificial Sequence
  Synthetic
SSEEELERLLEELRRITEEAKERMERSSKELEDVSREAEKRLEKSSRDLDKTVRDIKRRI

SEQ ID NO: 15098 - protein, 56 aa, Artificial Sequence
  Synthetic
AEDVKRRVRELIEEHKRLNKELLDESRELLKTHAELVKRILDESRRLLEELEKAAR

SEQ ID NO: 15099 - protein, 60 aa, Artificial Sequence
  Synthetic
SEREDATRRLRDIIRRLRDLIRRLTEESEESIKEIRERIERIIRTSEESLKELEERIRRN

SEQ ID NO: 15100 - protein, 55 aa, Artificial Sequence
  Synthetic
EDLERLREEIEDVVRKAEKRLDELHDEIRRTIEDAERRLDESNERAEKVVRDAEK

SEQ ID NO: 15101 - protein, 60 aa, Artificial Sequence
  Synthetic
SDEERALEKIRRLIEDLRRMVREMLERSKKSLEEHKELAREILRRSRESLERLKDVARRN

SEQ ID NO: 15102 - protein, 55 aa, Artificial Sequence
  Synthetic
RELDKLREELEEVVRRVEEKLDDSDRRANEVTREIEKTLDDLHREAEEVVKEIRR

SEQ ID NO: 15103 - protein, 60 aa, Artificial Sequence
  Synthetic
SVEETLRRLLEESERVNRRVKEDLDRIRRESEEVNKRAEEMAKELLDEIRKDIDRVRKRN

SEQ ID NO: 15104 - protein, 59 aa, Artificial Sequence
  Synthetic
EELAKEVIKTLRKLIEESKRNHEDLRRELRELIEESKRDHERLLRRLRELIKRIRDTTK

SEQ ID NO: 15105 - protein, 61 aa, Artificial Sequence
  Synthetic
DEIEDLLRRAEKLIRDLKRKNDKLLKESEELLERLRERAKEVLDESKKLLEELRELVRRRG

SEQ ID NO: 15106 - protein, 59 aa, Artificial Sequence
  Synthetic
ERAARDVERLKRRNKKVVEDSEDLARKTNKKSEELLREIRKRVEDSNRETKEILDRVRK

SEQ ID NO: 15107 - protein, 60 aa, Artificial Sequence
  Synthetic
DEDEELLKRLRDLIREVRDRVRRLLEEDKDSLRRIRERVEELLRRSEESLKDLEKKIREG

SEQ ID NO: 15108 - protein, 55 aa, Artificial Sequence
  Synthetic
EELKKIADKVEEVLREVEKELDKSRRTSDEILKKVEKAVRDLDRRVKEVIDRARR

SEQ ID NO: 15109 - protein, 60 aa, Artificial Sequence
  Synthetic
SEAEELLKRLERLLRESKKDLERLRKELKDLLEESRKDVTRLLDEIRRLLEEIKRRLDKR

SEQ ID NO: 15110 - protein, 59 aa, Artificial Sequence
  Synthetic
EEVKRMIEKLKKESEEVIRKAKEDLDRVTKESRRVIEEVERRLDELRERLREVVERVKT

SEQ ID NO: 15111 - protein, 60 aa, Artificial Sequence
  Synthetic
DEAEKLLKELRDLLEESRKDLERLLKELEDLLEESKRDLERLLEEITELLKRIKETVERR

SEQ ID NO: 15112 - protein, 59 aa, Artificial Sequence
  Synthetic
EEVKRKIDRLEEESRRVIEEARKRLEEVEEKSKKIIDDARRALDRIDKELRRVVEETRK

SEQ ID NO: 15113 - protein, 60 aa, Artificial Sequence
  Synthetic
SVEETARRLLDENRKLLEEAERIHTEINERNKELLKRADDLHRRVLEDLRKLLDKVAKEI

SEQ ID NO: 15114 - protein, 56 aa, Artificial Sequence
  Synthetic
ADTVVKRIKKVIDELEELNRKSKKELKEVIEDLERRNRDSIRRAEDLLRRLEEEVR

SEQ ID NO: 15115 - protein, 60 aa, Artificial Sequence
  Synthetic
KDEETVEKLLRELEELLKEAEERAKDLNRRNKELLDEADRRHEELLRRLEDLLRDVRRRI

SEQ ID NO: 15116 - protein, 56 aa, Artificial Sequence
  Synthetic
SDTVSERIRKVIREIERLIKEIVKEIEKLIRDLEKRNRESLKEIKDLLKKLKDEVD

SEQ ID NO: 15117 - protein, 60 aa, Artificial Sequence
  Synthetic
SRKEKLLTELKEILKRLKEEVEKIVKESEKSIEEHHRRSERLKRESKKSLDDLAKILERS

SEQ ID NO: 15118 - protein, 55 aa, Artificial Sequence
  Synthetic
EELEKIRREVEELLRRAEEELRRLNREIEENHKRVKRELEKIDKEMKDLLREAKR

SEQ ID NO: 15119 - protein, 60 aa, Artificial Sequence
  Synthetic
DRKERLKERLERLLKEHHDRSRELLRTSEESIRRHHEESRRLLRRSKESLDRLRDELRRL

SEQ ID NO: 15120 - protein, 55 aa, Artificial Sequence
  Synthetic
EELRKLERRARENHKRVREALERLNRRIEENHKRVRRRLEDLDRAAEELLREAKR

SEQ ID NO: 15121 - protein, 59 aa, Artificial Sequence
  Synthetic
SRKEDLKRRLEEIIKRLEEVVRRILRTSEESLKDHHEASKRLLEESEKSLKRLEEELKR

SEQ ID NO: 15122 - protein, 55 aa, Artificial Sequence
  Synthetic
EELRKIEERIRELAKRAREELDKLDKEVRKNHERVKRRLEELDRRAKELVREERR

SEQ ID NO: 15123 - protein, 60 aa, Artificial Sequence
  Synthetic
SEKEKLLKEIERLIEELRRVVKKAVEDSKESIDRHHERSRELLRRSRESLKDLERRLKDS

SEQ ID NO: 15124 - protein, 55 aa, Artificial Sequence
  Synthetic
RELEELEKRVRELERRIRETLTRLNEEIEKNHRRVEERLRDLNREAEKLAEEAKR

SEQ ID NO: 15125 - protein, 60 aa, Artificial Sequence
  Synthetic
SEKEDLSRRLAELLKEHHDRSKKLLDESRDSLRKHHKASRDMLRRSDESLKRLDRVRKER

SEQ ID NO: 15126 - protein, 55 aa, Artificial Sequence
  Synthetic
EELDRIRKEVKKNHDRARRALEKIDKEAKENHERVREALRKLNEDLEKLEREKRK

SEQ ID NO: 15127 - protein, 60 aa, Artificial Sequence
  Synthetic
REKEELIKRLKRLIDELRRVVKTLLADLERLLKEHHDRSRRILEESKRSLEELEKTLRRS

SEQ ID NO: 15128 - protein, 55 aa, Artificial Sequence
  Synthetic
DELRKLKEELEDLARKARKEIEDIKEKLRRNHERVKKALEDLNRTAEELLDRARQ

SEQ ID NO: 15129 - protein, 59 aa, Artificial Sequence
  Synthetic
SREEKLLKELKDIIDTLRRRVEEILTESEKSLRDHHRESRKIVEELRKLLEDLRRLLER

SEQ ID NO: 15130 - protein, 55 aa, Artificial Sequence
  Synthetic
RELDKIEEEARELVKRAEEKLREIDKRARDNHKRVRDELKRILDELKKLIDERRK

SEQ ID NO: 15131 - protein, 61 aa, Artificial Sequence
  Synthetic
SVEDSIDKIDKELEKNSERTKRTIDRIREESRRLIEEIKDRVRRLLREAERTIEDVKRKLK

SEQ ID NO: 15132 - protein, 59 aa, Artificial Sequence
  Synthetic
RRVVEELRERLKRLLEKHHDLMRRLTEDLKRLLEESERDARRLVKELEDALREIREDTR

SEQ ID NO: 15133 - protein, 59 aa, Artificial Sequence
  Synthetic
SREDKVRELEERLKRLNERLNREVKKVNEDNRRLLKRAEDTARRLAERIRRLLERVDRE

SEQ ID NO: 15134 - protein, 56 aa, Artificial Sequence
  Synthetic
DEELERRVEELLKRNEKLIREVKKRLEELLRRNEELIRRILEEVEKLLKDLEDKVR

SEQ ID NO: 15135 - protein, 60 aa, Artificial Sequence
  Synthetic
RREERVKEALERIRRLNKRINERVEEVNRENKRLLDEAKRTHEELEKEADRLLDDVRRKI

SEQ ID NO: 15136 - protein, 56 aa, Artificial Sequence
  Synthetic
EEELEKEIRKVLETNRKLAEDVRRDLERLLRRNRRLIEESKKEVEKLLKELEEDVR

SEQ ID NO: 15137 - protein, 60 aa, Artificial Sequence
  Synthetic
RRDDKVRKLEKELRDSNRKANDESKKLRDELRRLNEEANRRVRELERRIERLLEKVKDDI

SEQ ID NO: 15138 - protein, 56 aa, Artificial Sequence
  Synthetic
EEELKKRVEEALEEHRRLVEEVRRRVERILERNDELIKRIEETVEDLLRRLEEEVR

SEQ ID NO: 15139 - protein, 61 aa, Artificial Sequence
  Synthetic
SEIDEIVKEVERLLEKLKEDSRRTVEEVKKLLDELRKHSEDSVREIEELIERLRREIERDG

SEQ ID NO: 15140 - protein, 56 aa, Artificial Sequence
  Synthetic
EEKLRRLEEELREILKRSEDLARKLDEDLKRILERTRREIKRLEEDLDRLDEEVRR

SEQ ID NO: 15141 - protein, 61 aa, Artificial Sequence
  Synthetic
SESDEIIKEVDELIKRLRKHSKETVKEIEEILTRLEERSRKSVKEIEDEIRKLEDIVRKRG

SEQ ID NO: 15142 - protein, 56 aa, Artificial Sequence
  Synthetic
EEKARTLERKLDKILEETKREAEELKKRLDELVEKTRRLIEELKRRLKELLDRAET

SEQ ID NO: 15143 - protein, 61 aa, Artificial Sequence
  Synthetic
DESRKIVRDVEELIKRLEEHSRETVKRADRVLREDHKKSRDSVREIEKLIRDVKDKIDKRG

SEQ ID NO: 15144 - protein, 56 aa, Artificial Sequence
  Synthetic
EEEVRRLKKELDDLLEETKDLIRRLEEKLDKNVKETEDEIRRLIEELKKILEDATR

SEQ ID NO: 15145 - protein, 61 aa, Artificial Sequence
  Synthetic
REIDEIVKEIEKILRELKKRSDETVREIERLIEEDHRKSRKSVRDIEKLIDDLRKDVERRG

SEQ ID NO: 15146 - protein, 56 aa, Artificial Sequence
  Synthetic
EEKLRKLEEELRRLLEESKREADRLKKELRDNLKTTDELIKELKERLDKLKEDIER

SEQ ID NO: 15147 - protein, 61 aa, Artificial Sequence
  Synthetic
DESDRIVEEVRRLIKTDHDNSRRSVRKIEELIARDHKKVKEIVDEIRRLIRELEELIRRDG

SEQ ID NO: 15148 - protein, 56 aa, Artificial Sequence
  Synthetic
KEKLDRLEEEIDKNVKRTREEIERLKRELDKNLEDVRRLAKELEDELRKLDEDAKR

SEQ ID NO: 15149 - protein, 61 aa, Artificial Sequence
  Synthetic
SEIDRIIEDAERLLRELERNSDRSVEEIEKLIRDDHDNSRRTLEKIEKVIRELRKDVKDRG

SEQ ID NO: 15150 - protein, 56 aa, Artificial Sequence
  Synthetic
REKVKRLEEELRKILKKTREKAEELKRRIDRNVEETRRRARELKEELDRLLKEART

SEQ ID NO: 15151 - protein, 59 aa, Artificial Sequence
  Synthetic
DESRKVIKEIEDLLEEWKRRSERMIRESEKLIEELRERVDKILEDIDRLIRTLDELRKA

SEQ ID NO: 15152 - protein, 56 aa, Artificial Sequence
  Synthetic
EEEAKRLKDELEEILKESEDLSRRTKKELEDLLREVEKEIKKLEDKLKKLLDETDK

SEQ ID NO: 15153 - protein, 59 aa, Artificial Sequence
  Synthetic
SETEKVIREIEKLIDDIRKESERSIEESRKLLKELEEIVEKAIRDSRRLLEDLRRLVED

SEQ ID NO: 15154 - protein, 56 aa, Artificial Sequence
  Synthetic
EEKADTLRRKLEKLLEDTKRMSEKTKKEIEDLLKRVRELSEETKRRLDRILEDVER

SEQ ID NO: 15155 - protein, 59 aa, Artificial Sequence
  Synthetic
SESDKVVKEIEELLRELRKRVEEIIRESEALIETLKKRVDDAVRESRKLIKDLRELIER

SEQ ID NO: 15156 - protein, 56 aa, Artificial Sequence
  Synthetic
REKAKKLREELRKLMEEVRRLSKETKDKLDELLKTVEELSKELRERLKRLLDEAET

SEQ ID NO: 15157 - protein, 59 aa, Artificial Sequence
  Synthetic
SESDEVAKRIKELIDRLEERSRRSIRESDRLIKELEKEIEKAVRESEKLIRDLEELIRR

SEQ ID NO: 15158 - protein, 56 aa, Artificial Sequence
  Synthetic
EEKMRTLEEDLKRLLEETRDMSRKTKEKLEELLKRVRDLSKKLAEDLRRLLEEVRR

SEQ ID NO: 15159 - protein, 59 aa, Artificial Sequence
  Synthetic
SETDEVIKTLEELLERIKRRVEELVKRNKDLIKALEEEVRRIIKESKKLIDDLAELAKE

SEQ ID NO: 15160 - protein, 56 aa, Artificial Sequence
  Synthetic
KDKADRIREEIRKLEEEVKRLHDELKKELDDLLRRVEEDSKRTKERLRKLLTDVKK

SEQ ID NO: 15161 - protein, 60 aa, Artificial Sequence
  Synthetic
SEVDDLIRRLEKLLEDIKRRVEELVRRDEKITKDWERESERLIRELEELLKTIADLVRRR

SEQ ID NO: 15162 - protein, 56 aa, Artificial Sequence
  Synthetic
KKKLDEIRKRLEEILKRVRELLERLDRENEDLARKSKELADRIRKELKRILDEVRR

SEQ ID NO: 15163 - protein, 60 aa, Artificial Sequence
  Synthetic
DEVDELVKELEESLRRSREEIERLVREDEELTKTIREEVKKLVKTDEDLSKKIEDTVRRR

SEQ ID NO: 15164 - protein, 56 aa, Artificial Sequence
  Synthetic
KDKIKELKERNDKLLEEARRLAKELKERNDTLLKEVREELRRLRERNDRILKEAKK

SEQ ID NO: 15165 - protein, 60 aa, Artificial Sequence
  Synthetic
DEVDKLIRDLEELIRRIRKRLKELVDRDRELTREIRRRIRELIEESKEALERIDKRVKER

SEQ ID NO: 15166 - protein, 56 aa, Artificial Sequence
  Synthetic
KDKIKKLKDDLDRLLKEAEDRLRELEERNKRLLDEARKEIEKSDRRLEEILERVRR

SEQ ID NO: 15167 - protein, 60 aa, Artificial Sequence
  Synthetic
DEVDELIKTLKKLLEDIRERVERLVTDSKRSLDEIRETVRDLVRRDKELLKRIEDTVRER

SEQ ID NO: 15168 - protein, 56 aa, Artificial Sequence
  Synthetic
KDKLEKIKRDLEKILTEVREALRELDERLKKLAEEAKRLLEELRKRNRDILEKVRK

SEQ ID NO: 15169 - protein, 60 aa, Artificial Sequence
  Synthetic
DEVDKLIKEIEESLRRSEKEVRDLVRESERSLKEIEKRVRELVKRDEDLLKEIEEVVRKK

SEQ ID NO: 15170 - protein, 56 aa, Artificial Sequence
  Synthetic
EEKLKRLRKENKDLRDRVEEELRRLDKELDELLETVRRLLDELRKRNKKLLDEARK

SEQ ID NO: 15171 - protein, 60 aa, Artificial Sequence
  Synthetic
RLEEEIERLRREVEELIERSKDLIRRSHTKSRKLIEDVKRELDRLRREVEELIKRAEDRT

SEQ ID NO: 15172 - protein, 55 aa, Artificial Sequence
  Synthetic
DRVVREAEKLIRKIAEDNRKALEESDELIRRSEKDVRDMVRRAEELIEEIKRRVD

SEQ ID NO: 15173 - protein, 59 aa, Artificial Sequence
  Synthetic
SKDEEVERLKEELDRLLEEVRRLSEESKKRNDELLKRAEEIIEELKKELDEIREEVERR

SEQ ID NO: 15174 - protein, 56 aa, Artificial Sequence
  Synthetic
KDTVVRRAKKVIDELRKDVERVKRESDEVLKELEKLNREIEREVRKLLKELRDTVR

SEQ ID NO: 15175 - protein, 59 aa, Artificial Sequence
  Synthetic
RSEEEARKLERENKKLVDDARKLSEESRRRNDKLVEEARRIAEELKRELDRLLEEVDRR

SEQ ID NO: 15176 - protein, 56 aa, Artificial Sequence
  Synthetic
TKTVVDRVKKLLDDLREVNREILRESDKVLRDLKRLNDEIKREVEELLERLEREVR

SEQ ID NO: 15177 - protein, 59 aa, Artificial Sequence
  Synthetic
SAEEDAERMKDRNRRLLEKVRRLSEESKRRNDKLVEDAKKLSEDTRRKLEDIARKVRKR

SEQ ID NO: 15178 - protein, 56 aa, Artificial Sequence
  Synthetic
KDRVSEEIDRLLRDLERRNREILKESKEVLDRLKKLNEEILKESEDLLRRLEEEVR

SEQ ID NO: 15179 - protein, 60 aa, Artificial Sequence
  Synthetic
SEIEKVVKDVDKLLKELEDHTRKSLEDSKRLLDELRKHTEDTSREVKELLERLEEVIRRN

SEQ ID NO: 15180 - protein, 56 aa, Artificial Sequence
  Synthetic
KEDADRLRERLDRILEESERLSRETKEELDRLLEDSKRKIRELEERLKKLLDDAER

SEQ ID NO: 15181 - protein, 60 aa, Artificial Sequence
  Synthetic
DDSDKVLKELEKLLEDLERHTRESLRESDELLKELKEHTKTTLRRSERLLRELKRLVDEN

SEQ ID NO: 15182 - protein, 56 aa, Artificial Sequence
  Synthetic
EKDVEEVRRKVEELLKDSERLSKETKERLRDILRDSRRLSRETKEELKRILKEVRD

SEQ ID NO: 15183 - protein, 60 aa, Artificial Sequence
  Synthetic
RESEEVIKEVEKLLEELKENTKRTLKESRDLLKTLEDHTRETKKTVEKMLKELEDKVRKR

SEQ ID NO: 15184 - protein, 56 aa, Artificial Sequence
  Synthetic
EEEADRLRRELKKILDRSRELSRKTKEDLKKLLKESEDIIRELDRRLEEILKEVER

SEQ ID NO: 15185 - protein, 60 aa, Artificial Sequence
  Synthetic
EEIERVIKEVKDLIEELRRNTERTLRESEELLKTLKKISDDSKEEVERMLRELRELVKSN

SEQ ID NO: 15186 - protein, 56 aa, Artificial Sequence
  Synthetic
KEDADRLRREVDKLLEESKRLSEETKRELDRILEETKRTLERLKEELDKILEEVER

SEQ ID NO: 15187 - protein, 60 aa, Artificial Sequence
  Synthetic
SEKEKLVEEVRRIIERHKRVTEELLKELRRILKEWEDVSRDIERRVREILERLERAARDG

SEQ ID NO: 15188 - protein, 55 aa, Artificial Sequence
  Synthetic
KDLEELKKELEDSARRSKKLADDVREELKTLLRESERIIKELRKELEKLLREVEK

SEQ ID NO: 15189 - protein, 60 aa, Artificial Sequence
  Synthetic
TLEEVLKEVKRRVERVNEEDKRVLDESRKRAKEINDEDRRLLEESKRKAEELLERLRRKD

SEQ ID NO: 15190 - protein, 56 aa, Artificial Sequence
  Synthetic
EDRLRREAERILREIRELSRELKRKNEELLRTIRRVSEELRKKNEEILERVDREIK

SEQ ID NO: 15191 - protein, 60 aa, Artificial Sequence
  Synthetic
SAKELLDDLRKKIEDNVRETEKLLRRLREKVEKIEREIKELVRKLREDLERLLEKVKRRG

SEQ ID NO: 15192 - protein, 55 aa, Artificial Sequence
  Synthetic
KEVVDTVRELIERDHKKSRDSVRRVDELIDRARKDVRRVVEEVRKDLEKLDEDVK

SEQ ID NO: 15193 - protein, 59 aa, Artificial Sequence
  Synthetic
REVEEVLKDLKRLIDEAKKRVEDAIREIDRLIREWERLNREMLREIKKSNDEVRELVKA

SEQ ID NO: 15194 - protein, 56 aa, Artificial Sequence
  Synthetic
EEAVRDVERRLEKLLKEIKDLIDRLKEKVDRVKREVERSIEELKRHNEEVLKEVRK

SEQ ID NO: 15195 - protein, 59 aa, Artificial Sequence
  Synthetic
KEVEDVLEELDRLIETWARLNRELVERIRRLLEEWREENRKVVEEVRRSNETLRELVER

SEQ ID NO: 15196 - protein, 56 aa, Artificial Sequence
  Synthetic
EEVVRRVKDKLREVKREVEETARELRERVDDLLRKVEESVTRLKRHNEDLLREVER

SEQ ID NO: 15197 - protein, 59 aa, Artificial Sequence
  Synthetic
SEVEEVLRDLKRLLEEWKKRNEDLVRDVERLLREWKEANDRALKKSRDSNKELERLARD

SEQ ID NO: 15198 - protein, 56 aa, Artificial Sequence
  Synthetic
KEMVERVRREIKRLEEEVKKTITDLKERLKKLKEDADRSSRESEEHNKKVVEDVRR

SEQ ID NO: 15199 - protein, 59 aa, Artificial Sequence
  Synthetic
REVEEVLKELDRLIDELRKEVEKIVREVERSNDEWRRRNKELVDEVRRELDRLRKLVDD

SEQ ID NO: 15200 - protein, 56 aa, Artificial Sequence
  Synthetic
KEVVDDVKRKLEDLKRRVDELVRRLEEHNKDLRRKVEESAKDLRRKLEELRERVER

SEQ ID NO: 15201 - protein, 60 aa, Artificial Sequence
  Synthetic
SEKDEVRKTIERLLKEVEKMIRRVLKEVEDLLRELKKRTEKLKRELDESHRRVKEVIERR

SEQ ID NO: 15202 - protein, 56 aa, Artificial Sequence
  Synthetic
RELLEEVERALKKLKEDVDKVIEELREKLKRHHEDVKRAIDRVREESKRLKDEAEK

SEQ ID NO: 15203 - protein, 60 aa, Artificial Sequence
  Synthetic
REDEEVVKTLRELLREAKERTDRLLRELREIIKTMRKRLRDIEEDLRRSHREIEKLIRDR

SEQ ID NO: 15204 - protein, 56 aa, Artificial Sequence
  Synthetic
RELLEEVRKELERHHREARRAVEEVKKLIDDLMREVRKLIDEVRKDSERLRREVER

SEQ ID NO: 15205 - protein, 60 aa, Artificial Sequence
  Synthetic
DEDEEVKRRLEKLLEDADRVTEKIRKDLKETHDRVKRAIDELKKELEKSHRTIKEVIERR

SEQ ID NO: 15206 - protein, 56 aa, Artificial Sequence
  Synthetic
RELVEEVRDRLRKHHKKVRDIVDDVDKRSKDLERTARRVIEDVKEKSDRLKEEVDR

SEQ ID NO: 15207 - protein, 56 aa, Artificial Sequence
  Synthetic
EDEERVKEKLKRLLEKAEEALRRSKRRNEENKKEHERVLKEIDERLKRLEEKVRRG

SEQ ID NO: 15208 - protein, 56 aa, Artificial Sequence
  Synthetic
REDIERLLKELDDRIRRIIEELKRSDEELHKENRRKIKELEDLVREADKRIEDKRK

SEQ ID NO: 15209 - protein, 56 aa, Artificial Sequence
  Synthetic
DDEKEIKDRLDDNKRKDDEMTKRAEDELRKNLETTKEALRDIKRKLDRLREKVERN

SEQ ID NO: 15210 - protein, 56 aa, Artificial Sequence
  Synthetic
REELEKIVRDLHKRNKEVIDDIRRLIDELHKRDRETIKRLEEIVRRADEKIKEKAR

SEQ ID NO: 15211 - protein, 56 aa, Artificial Sequence
  Synthetic
SDEERIEERLKRNEETDKRATDENEKRNDDLLRRAKEALDRNRERNDELRDKVRKE

SEQ ID NO: 15212 - protein, 56 aa, Artificial Sequence
  Synthetic
REELSKLVKELHDDNREKIKDSDRSDDDIRREIERMIRETNKSDEDIARAIDESAR

SEQ ID NO: 15213 - protein, 57 aa, Artificial Sequence
  Synthetic
SERERVEERLKELAKRVEDAIRRLKKDLERTKEEHKEADRRVKEKLKRLKEEVDRAN

SEQ ID NO: 15214 - protein, 56 aa, Artificial Sequence
  Synthetic
DTEVEELLKDVKRKIEEMIKELKRLNDELNKRSEEMIRRNDDLIKRLEEEIRKDSK

SEQ ID NO: 15215 - protein, 59 aa, Artificial Sequence
  Synthetic
SSEDEVRKTVDELRERSERTIRDLERVDRELKKEHEELIKELREIVKELREKVKRASKE

SEQ ID NO: 15216 - protein, 55 aa, Artificial Sequence
  Synthetic
KRIEEELRKLHKENKEAVERSERTNRDILRRNDEADKEIEKELRELIEKLERDRK

SEQ ID NO: 15217 - protein, 57 aa, Artificial Sequence
  Synthetic
SEKEDLKEKLKRNEEEHRRAVEEIRKRLDENRRRHEKVIKEIEDALKKDEDDVDKEN

SEQ ID NO: 15218 - protein, 56 aa, Artificial Sequence
  Synthetic
KDELTREIEKLHRTNREMVRDLRETLKRLHEENKRLVDELRRLLEELHRRTREASR

SEQ ID NO: 15219 - protein, 57 aa, Artificial Sequence
  Synthetic
SEEEEVRKALERLRRELKRVLERSEELLKEWEDRLRRVLEESRRLLERWREELEKDG

SEQ ID NO: 15220 - protein, 56 aa, Artificial Sequence
  Synthetic
REELKEILKRLEDTLREIEKEAKRLNDELARVLEEIRRKSERENRRLKELIDRLRK

SEQ ID NO: 15221 - protein, 57 aa, Artificial Sequence
  Synthetic
SDRERLEEMLKRLKEELEKVRRDNERSLEEIKRSVDRVLEEHKRTLEELKREVDRAN

SEQ ID NO: 15222 - protein, 56 aa, Artificial Sequence
  Synthetic
GEEADEVVKRLADVLEKAREDLKRSDKRLRDSNRESRKELEKINRDLRRKLEEAKR

SEQ ID NO: 15223 - protein, 57 aa, Artificial Sequence
  Synthetic
KDEERLETVLREIETRAEKVARDHRDSLRRIREELERVLKENKDTLKRIREELEKTN

SEQ ID NO: 15224 - protein, 55 aa, Artificial Sequence
  Synthetic
EEVKRVLKELRDLLEEIRKRLEDINRDLKRKLDEIEEELRRSDEKLKRDLEEARK

SEQ ID NO: 15225 - protein, 56 aa, Artificial Sequence
  Synthetic
SDEDKLREDLRRLEEELKKVLDDHRKSLKEIEDSLRRVLEENKRTLEKLKRDAEKA

SEQ ID NO: 15226 - protein, 56 aa, Artificial Sequence
  Synthetic
GEEAKKVVKALEDVLREIRERLKRINDELRERNKKSSDELRKSDERLKRELDKMRK

SEQ ID NO: 15227 - protein, 59 aa, Artificial Sequence
  Synthetic
DADKELEKLLREWEKRSEELRKRLEDINRRWEEESKRLKKELKDINADLRRKVEELRRD

SEQ ID NO: 15228 - protein, 59 aa, Artificial Sequence
  Synthetic
SDVIRRAKEELDRIEKKDRDVLDDNRRLIETWRREDKKVNDDNRRSNEELKRELDKTRE

SEQ ID NO: 15229 - protein, 59 aa, Artificial Sequence
  Synthetic
SAEEELKELLERWDRDSKRAEEELRRLLEESRERSEKVLRDLKRLLDEMEDAVRKLKRD

SEQ ID NO: 15230 - protein, 59 aa, Artificial Sequence
  Synthetic
SEVIERFKDVLRRIEKRNKEVIDRAKEVIDEDEKRNREVIERVERKVERLRKEVEDREK

SEQ ID NO: 15231 - protein, 63 aa, Artificial Sequence
  Synthetic
EEKERMREVLKRLEEEAKKVLDDNRRAVEEIEKKDREVHKRNRDLLERWREEMEEILRKARER

SEQ ID NO: 15232 - protein, 56 aa, Artificial Sequence
  Synthetic
EEELKKIIERAREELEKVRRELEEHLKRWDEISKKLSKDLERHNEEVARTLKRSRD

SEQ ID NO: 15233 - protein, 60 aa, Artificial Sequence
  Synthetic
SVLEEFKKRIEELHRRDRKVLEDHRRRLKEWEEELKRVLDEHRESLKRIKERVDRVKKDL

SEQ ID NO: 15234 - protein, 56 aa, Artificial Sequence
  Synthetic
SDALRELLREWDKLSKELEKELRDLNREVERSIREAKKKLEKANEEMRRTLEKDRK

SEQ ID NO: 15235 - protein, 60 aa, Artificial Sequence
  Synthetic
STEEDAERALEELKEELRRVEKENRDSLKRIREKLKEVEDEHRKTLEELKKELDDVMRKI

SEQ ID NO: 15236 - protein, 56 aa, Artificial Sequence
  Synthetic
KDSLKRLLDEARKKLEELKRRLEKLDRDLDESLKRLKEDLDRLDRELRRLLDELDK

SEQ ID NO: 15237 - protein, 60 aa, Artificial Sequence
  Synthetic
SVEEEARKALDDLRRRLEEVTRRHRESLKELREELDEVRKENEKSLKKIKDDLEAVRRRI

SEQ ID NO: 15238 - protein, 56 aa, Artificial Sequence
  Synthetic
EEELRRLLKKLEDDLRRLKKRLDELDRRLRELVKRLLEDLKRLDDELKKLLEETER

SEQ ID NO: 15239 - protein, 57 aa, Artificial Sequence
  Synthetic
SAEEELKRLLEEHKKESEDVKRRLRDLLRELEDIHRRMTERLRELLKRLDDILRRRN

SEQ ID NO: 15240 - protein, 55 aa, Artificial Sequence
  Synthetic
EEILKKLEEISRRVREKVKKELDELKELIRRHARKLEKILEEIRRLIEDLERRAR

SEQ ID NO: 15241 - protein, 61 aa, Artificial Sequence
  Synthetic
SEAEEVLKRIRDILETLRREHERILKEIRELNEEFKKEVEKALRKIKRELEELEKDAEREG

SEQ ID NO: 15242 - protein, 59 aa, Artificial Sequence
  Synthetic
ERVEKKIEELLREIRKVNDEVHKRIRKLLEDHRRTVDEARRRIEELLRRLKKTLDDIDK

SEQ ID NO: 15243 - protein, 57 aa, Artificial Sequence
  Synthetic
SDKDELKRLLDDHERTSTRARESLEKLSREHRKTSREVEERLKRLVDAIRDTARRVD

SEQ ID NO: 15244 - protein, 59 aa, Artificial Sequence
  Synthetic
EEVVRRILRELRELNERAKEMLERILRKLEELNREYKKKVREILERIKELLRDLRRKAN

SEQ ID NO: 15245 - protein, 61 aa, Artificial Sequence
  Synthetic
SADDEIRKLKKEAEDILRKAREDRERLKEKNRKIDEDMRRTLKKLHEETRELEKKVRREKG

SEQ ID NO: 15246 - protein, 55 aa, Artificial Sequence
  Synthetic
EELVKEIRELLRRLEEKIEELRRRYEKKLEELKRKVDELIRRYKRKLERVAEEVK

SEQ ID NO: 15247 - protein, 60 aa, Artificial Sequence
  Synthetic
SEEEELVRRVEEKIKASEKHARELVEETRKKLDESRKKWKDLARRSRRLLEELKDKVDKG

SEQ ID NO: 15248 - protein, 55 aa, Artificial Sequence
  Synthetic
EELRRLEKELRDLNKRVKEESRKLEEDLKDIHERAKEDSKRLKRELEKIKEEVER

SEQ ID NO: 15249 - protein, 59 aa, Artificial Sequence
  Synthetic
DAERILRELEERLKRLLDEHREISKELRKRNKDLLKEHKERSKRVKEELKELVKEVEDG

SEQ ID NO: 15250 - protein, 56 aa, Artificial Sequence
  Synthetic
IEELVKEVEKLIKELREKSREVEREVDKMIRDNARKSEKIVRDAKRLLEKLEREVR

SEQ ID NO: 15251 - protein, 59 aa, Artificial Sequence
  Synthetic
RSEDILRELRERVKRSEERHEKISRDLERKNRELLKEHRERSEKLKRELEELVKRVEDR

SEQ ID NO: 15252 - protein, 56 aa, Artificial Sequence
  Synthetic
AEDLARRVDETIKDHERHSEEVKRDVTEKIKENEKLSRDIVRRVEKLLRDLEREVR

SEQ ID NO: 15253 - protein, 59 aa, Artificial Sequence
  Synthetic
SREDILRDLRRRLEELLRRHKRISDELRKRNKKLLDDAEKRAKELREELEKLVREAERR

SEQ ID NO: 15254 - protein, 56 aa, Artificial Sequence
  Synthetic
IEELVKRVDKLIKELKRKSEEVMKRVDELIRRNERLIREIVKEVEKLLEDLEREVR

SEQ ID NO: 15255 - protein, 59 aa, Artificial Sequence
  Synthetic
SAEETIERLKEEIEKLLREAEEILRRLRERNRRLLEEHKDISRKLEEELRKLMEKVRRG

SEQ ID NO: 15256 - protein, 56 aa, Artificial Sequence
  Synthetic
VEELVRRVRELIKRLRDMAKEIEERVDETIRRNRRLSEKVARDVERLLRELEERVR

SEQ ID NO: 15257 - protein, 59 aa, Artificial Sequence
  Synthetic
DAERILKELEERLDRLSEEAKKILDELRRENEELLREHDERVKKLKEDLKRLEKKVEDG

SEQ ID NO: 15258 - protein, 56 aa, Artificial Sequence
  Synthetic
VEELVKRVTKLIEDLRRLAKKISDEVRKLIEENRRASKRVEDEARELLKRLEDAVR

SEQ ID NO: 15259 - protein, 56 aa, Artificial Sequence
  Synthetic
SEIEKMVKDVRDLLKRLKDEVKKISERWEDSLRKLKKRSEDTVKRVKEILEELRRR

SEQ ID NO: 15260 - protein, 56 aa, Artificial Sequence
  Synthetic
RDALRELERELDKLRKEIKKELDRLRKENREVNERHKELSKRLEEELERVKRELDT

SEQ ID NO: 15261 - protein, 57 aa, Artificial Sequence
  Synthetic
DEVRELVKTVKKVLDDIRREVEETLRRYEKLVEDLKRRSDKSVKDVDDEIKRAEEEG

SEQ ID NO: 15262 - protein, 56 aa, Artificial Sequence
  Synthetic
EELIKRLREEAEKLIRRAKEEHERLEEESKRLLEENEELLDRLDKKVRTLLDKLEK

SEQ ID NO: 15263 - protein, 60 aa, Artificial Sequence
  Synthetic
SEEDRVRETVKKLLEDHRRKTEKVTEDVRRLLKENREKVEDAVDKARKLLKRLEELRREG

SEQ ID NO: 15264 - protein, 55 aa, Artificial Sequence
  Synthetic
EKLKRIEEELRKSRERTKRLLEEIRKELEDSKKEVEDLLRRLREELKRLKDEIER

SEQ ID NO: 15265 - protein, 63 aa, Artificial Sequence
  Synthetic
SEVEELVKRAEELIRELKKLSEDSVRELEKLLDEYRKTTEKLKRELEELLKEVEDVVRKLRDQ

SEQ ID NO: 15266 - protein, 56 aa, Artificial Sequence
  Synthetic
EKLLRKIEEDVRRLKETNERLLKRVDEELKRLDEESRRVLKEAKERLKELKDRERK

SEQ ID NO: 15267 - protein, 57 aa, Artificial Sequence
  Synthetic
DEVEKVLDELEKVIREVEERIKTTNKRLREVVERVERRIDKSDRELEEMIERVERKL

SEQ ID NO: 15268 - protein, 56 aa, Artificial Sequence
  Synthetic
SEEVRKEVRRLDKRVKEIVEESRKLVKELAERVEEIVEESKRLVEKLAREVDETRR

SEQ ID NO: 15269 - protein, 57 aa, Artificial Sequence
  Synthetic
SEIEKALKEAREAIEDAKKKIDDTDRENEKASRDAERRIDKSDKEAEEAVRRAEEEA

SEQ ID NO: 15270 - protein, 56 aa, Artificial Sequence
  Synthetic
KDEVTKAARKAADDAREAAERSRKLAEENARRAKKAADDSRKLARELAKEAKKAAD

SEQ ID NO: 15271 - protein, 57 aa, Artificial Sequence
  Synthetic
KELEDVLDTVRRAIERVKRESKKINDELEKELKKVKDELDKSHEEVRRAVEDVARKL

SEQ ID NO: 15272 - protein, 56 aa, Artificial Sequence
  Synthetic
VKDIEKLVRDVVRRAEKVVDDDRKLVRDIVRDAKRVVRDSERTVRDIVKKADENTK

SEQ ID NO: 15273 - protein, 57 aa, Artificial Sequence
  Synthetic
SKLEKILKDLERAVREVARELERTHRELEEAVKKVKKRLEDTNRRLTEALKRVKDKL

SEQ ID NO: 15274 - protein, 56 aa, Artificial Sequence
  Synthetic
VSEIKKLVDDIVRRLRKVVKDSEREVREIMKRADDVVRTSEKTVEDIVKEAEDDAR

SEQ ID NO: 15275 - protein, 57 aa, Artificial Sequence
  Synthetic
SELEEAAKRAREAAKKAKEALKRSLKEAEDAAREAEEDLKRSNDKNRKATREAEERA

SEQ ID NO: 15276 - protein, 56 aa, Artificial Sequence
  Synthetic
AEEAKKAADDLARKAKEAADESKRLSEELAKKAKEAAKTSDKLAKENAEEAKKAAK

SEQ ID NO: 15277 - protein, 57 aa, Artificial Sequence
  Synthetic
DELERVLEDLKRVMEEVERKLRESNKELEKAVRRVEELLKRSNEKNRKVTREVREKA

SEQ ID NO: 15278 - protein, 56 aa, Artificial Sequence
  Synthetic
AKDVEDLVRRLMEKLERIVEESERLSDELRRRAEEVVKTSEDLVRENAKRVDDAAK

SEQ ID NO: 15279 - protein, 57 aa, Artificial Sequence
  Synthetic
DELEEIEKKLRDVVREVEEKLRETNRRLREVVKRVEERLKKSNEDLRRAVRKVEESV

SEQ ID NO: 15280 - protein, 56 aa, Artificial Sequence
  Synthetic
AKDVEKLVKELMEEAEKIVEESRERVDRLMKRLDDIVRESERLSKELADRADEVEK

SEQ ID NO: 15281 - protein, 58 aa, Artificial Sequence
  Synthetic
RELEEILRTLEEMIERVKEKHERSKRELEKVITEVKEELRRSNEELRRVIEEVERKLG

SEQ ID NO: 15282 - protein, 56 aa, Artificial Sequence
  Synthetic
VDEVRKVVEDIVREAEKSVRENEELVKAIMRELKRVVKEAEELSEEIVRRLEERTR

SEQ ID NO: 15283 - protein, 61 aa, Artificial Sequence
  Synthetic
KELEDVKRRLEKVHRDVNEASKEIVTRLREVHKRANDESKKIIERLDTVLREVARRLADRR

SEQ ID NO: 15284 - protein, 56 aa, Artificial Sequence
  Synthetic
AEEVERRVRELEKDVRRLVEDIRRLVEELMRNAKEIVDTAEKLVRELERKLEEVVR

SEQ ID NO: 15285 - protein, 61 aa, Artificial Sequence
  Synthetic
DEVEDIIRRLEKFHREVNEESKRIIEELERVHREVNRKSEEIVRKLEKVLDEVREKAKRRS

SEQ ID NO: 15286 - protein, 56 aa, Artificial Sequence
  Synthetic
AEEVEEVVRRLVRHAEAVVERIERLVEELVRNAEKLVEEVKRKADRLVEEADRTVR

SEQ ID NO: 15287 - protein, 57 aa, Artificial Sequence
  Synthetic
DELEEVKRRLDEVNKRVEDEHRRVEEELRKVLEDVAREHEEVIKELERVLEKVRRAK

SEQ ID NO: 15288 - protein, 56 aa, Artificial Sequence
  Synthetic
SDEARKLVKENERRVEETVRRSEKLVRDAMKKAKDTVRRSAELVKELMDRVERVVR

SEQ ID NO: 15289 - protein, 57 aa, Artificial Sequence
  Synthetic
SEVEKVKKEAREMLKRVTDLLKEVNDRLKEVNKRVREEIRRVIERVREVLKRVAREV

SEQ ID NO: 15290 - protein, 56 aa, Artificial Sequence
  Synthetic
LEDLRRVVEELEKRARDVVEESRRLVDEDRKHVEDVVRRVRDVVRELEERAERITR

SEQ ID NO: 15291 - protein, 59 aa, Artificial Sequence
  Synthetic
SEVEKVVEENKKSVKTVRERVTELVKRNRDSVEEVKRRAEEMVRRNRKSVEEVRELLAR

SEQ ID NO: 15292 - protein, 59 aa, Artificial Sequence
  Synthetic
EEAKRRVDRVSEELEEVLRRVEEELRRVSKDLRRVLDEVKKEVDRVSEDLERVLRKDTT

SEQ ID NO: 15293 - protein, 60 aa, Artificial Sequence
  Synthetic
DEVDEIVRRIEEIVRESEEMAERIVRDIKRVVEKSRKDVEDNVDELRKIVEKVEETAKRT

SEQ ID NO: 15294 - protein, 59 aa, Artificial Sequence
  Synthetic
RDAERKVRDLLRDLERVNTEADEKSKKLIKELEKVNKEAEDKSRKLIKELEDVLREARR

SEQ ID NO: 15295 - protein, 60 aa, Artificial Sequence
  Synthetic
SSVDEIVKEAEKVVEDSREEAREIVERAEEIVRDSARKVDENVRRLEEIVRKVKEVADRT

SEQ ID NO: 15296 - protein, 59 aa, Artificial Sequence
  Synthetic
RDAERKVREVIERLKKVNDEVRKKLDELTRRLEDVNRKANERSTDLVRKLRRVLEEARR

SEQ ID NO: 15297 - protein, 59 aa, Artificial Sequence
  Synthetic
SADRKIEEMRKEIKRSTDEARRLVEELIRKIERSNEKVKRDVEKLIEDIRRVIRRVRED

SEQ ID NO: 15298 - protein, 55 aa, Artificial Sequence
  Synthetic
EELKKKLEDIVREDEKLVEELTRLAEDIVRRDTKLVRELLERAKRVVDRVREEVK

SEQ ID NO: 15299 - protein, 60 aa, Artificial Sequence
  Synthetic
DAEELVRELEERIKRSHERLEELLREVKRLIERSHEELKRLNEEVLRELDRVLDEVRKRK

SEQ ID NO: 15300 - protein, 55 aa, Artificial Sequence
  Synthetic
KDVVRELERIVKENSELAERVFREVEKIVRENTKLAEDSVRELKRLVEELKKRVK

SEQ ID NO: 15301 - protein, 59 aa, Artificial Sequence
  Synthetic
SDVEDVVRKLRELVKTNLKKVEDRVRKLKEEVEENVRRAEKIVRELEEEVERLLKLVAD

SEQ ID NO: 15302 - protein, 56 aa, Artificial Sequence
  Synthetic
REVAEEVERRLERSHRESRKLADEVRRALEKSNRKTRELLRRVDERVEEVREELDR

SEQ ID NO: 15303 - protein, 59 aa, Artificial Sequence
  Synthetic
SMEELVDKVEKELEESSRRSKELLDEVRRLLEESNKKTEDLLREVEELLKDVEREAEEK

SEQ ID NO: 15304 - protein, 53 aa, Artificial Sequence
  Synthetic
VVRDVERLVEENRERVKRIADEMRKLVKENEDRARDVVRRLRELVKRLRERVE

SEQ ID NO: 15305 - protein, 59 aa, Artificial Sequence
  Synthetic
KELEDIARDLERLLRENKKLIKEIVDRLRRLLEDNTRKVKKIVDEVKKLLDDLDKLRKD

SEQ ID NO: 15306 - protein, 56 aa, Artificial Sequence
  Synthetic
KEVADKVREDLERSNDEMRRVIEKIREDLRRSLKEAKERLDEIKERIDRLLDAARK

SEQ ID NO: 15307 - protein, 60 aa, Artificial Sequence
  Synthetic
KLEELLTEVRRRIEEVSRDLERVLREVEEDIKRTSDELDRVNRKVETEIKEVTERAEEKG

SEQ ID NO: 15308 - protein, 59 aa, Artificial Sequence
  Synthetic
EELVREVIERLKELVKKDKKLVEDVLRELKRLVDEDRKLVEDSLRRAKEIVDRARERVK

SEQ ID NO: 15309 - protein, 60 aa, Artificial Sequence
  Synthetic
SIEDVLREVERLLREVIERNRKVHEEVNERSREVERELKRVHDEANRESEEVIREAKRKG

SEQ ID NO: 15310 - protein, 56 aa, Artificial Sequence
  Synthetic
VEELERRAREIVKRVRELVDTHRENLERIVERAKELIKELEENLRDIVREIRERVR

SEQ ID NO: 15311 - protein, 58 aa, Artificial Sequence
  Synthetic
KEVEEVADRSRRVVEESKRRLDDVVRRVKEDSDRLRRDIERMVKRIKEIVKRVREEIG

SEQ ID NO: 15312 - protein, 56 aa, Artificial Sequence
  Synthetic
RKILKELLDRDRKSVKESEDEVKRLLDSNHELSRRIREELKRLLEKVKELVDRVRT

SEQ ID NO: 15313 - protein, 58 aa, Artificial Sequence
  Synthetic
KEVEDVKRKLEKIARDSEEALRRVVDELRKIVTESKKKLDKAVKEVKDDSKRVEETIG

SEQ ID NO: 15314 - protein, 56 aa, Artificial Sequence
  Synthetic
RDIMRKLLEEVKRSIDESKKRVKELVDEVRDSVRRSEEEVERLLRSNHRLSDEVRK

SEQ ID NO: 15315 - protein, 58 aa, Artificial Sequence
  Synthetic
DDVERVIEEVKRVVDDSKRRAEEVVEESRKIVTDSERKVREMVRDVRRIVKEVEERIG

SEQ ID NO: 15316 - protein, 56 aa, Artificial Sequence
  Synthetic
RRIVKKLLEDVRKSVKESKDTVDKLVEENKRSVDRSLRELEKLLKEVEDLIREVTR

SEQ ID NO: 15317 - protein, 58 aa, Artificial Sequence
  Synthetic
DEVDEVVKRSRDVVTESEKRLRDVVRRSKEIAEDSRRRVREVVERLKEIVREVEERIG

SEQ ID NO: 15318 - protein, 56 aa, Artificial Sequence
  Synthetic
RRVVEELLRRDEKSVEDSLRRVEKLVEDNRKTSEDIEREVRRLEEEVRKLVEDVTK

SEQ ID NO: 15319 - protein, 58 aa, Artificial Sequence
  Synthetic
REVDEVVERMKELVATVKRENDEVVKELKKLVKELEDDNRRVVEESKKSVEDLARRVG

SEQ ID NO: 15320 - protein, 56 aa, Artificial Sequence
  Synthetic
RDLVREVEKRVRDIVEESRKLAEETRKKVEDIIEKSKRIAEDTLEKNKEMVERLER

SEQ ID NO: 15321 - protein, 59 aa, Artificial Sequence
  Synthetic
REDELVERLVDKVRRSSKEVRDRAEEMVRRNEKLVRDVEEDLDRLVEENKKLVDSVSRL

SEQ ID NO: 15322 - protein, 55 aa, Artificial Sequence
  Synthetic
KEVVDRLRELVERSEKDVRKVVEEDKRITDKLEKRVREVVKRNEEITDELRERVR

SEQ ID NO: 15323 - protein, 60 aa, Artificial Sequence
  Synthetic
SSIERVAKLVEEVERHVRKSIKDVEKLVRDVERHIEESVKTVSKLVEDVKRAVEELRRKV

SEQ ID NO: 15324 - protein, 62 aa, Artificial Sequence
  Synthetic
EDVERLVREVVKRLEEIVERSERLVREVEERLKEIVERSRRLSKENEDELRKIEKEVRDRVK

SEQ ID NO: 15325 - protein, 55 aa, Artificial Sequence
  Synthetic
KDVEDAERRLKELLDRLKRFVEESVKTSKKIVDDSKRVVEESAKRSRDIVREVKD

SEQ ID NO: 15326 - protein, 56 aa, Artificial Sequence
  Synthetic
REKIEELVKEVDKLIKDVVRRMEKLNREVKKSADDSAREVEELNRRVREVVERVRT

SEQ ID NO: 15327 - protein, 57 aa, Artificial Sequence
  Synthetic
DEVEEVEKELRELVKRSEEVAREVKDRLRKLVEESERVVRESRRKSREIVEEIRKKV

SEQ ID NO: 15328 - protein, 56 aa, Artificial Sequence
  Synthetic
KDEARRLVEEVKRSVEKSVKELEDLVEEVKRSVEESVKEAKELNDRVDETVKRRAT

SEQ ID NO: 15329 - protein, 57 aa, Artificial Sequence
  Synthetic
RSVDEVEKELRELVERITRFVEKSVRDSRKIVEDSKREVEKVKDDLRKIVEEIRRKV

SEQ ID NO: 15330 - protein, 56 aa, Artificial Sequence
  Synthetic
EEDAKRLVKEVAELIKRVVEEMKKLNDEVEESARRSVEEARRLVEEVKRLVDEVAT

SEQ ID NO: 15331 - protein, 59 aa, Artificial Sequence
  Synthetic
EVEELVERVLRELERLVRENKESSDRIKEELRKLVEDNEKSVRDTKRTAEKLVDDLRRK

SEQ ID NO: 15332 - protein, 59 aa, Artificial Sequence
  Synthetic
ERVVRKVREDVKRVERLSKEIVDDSKREVEKVVETSRRIAEKSTDVVRRVKRELEEITR

SEQ ID NO: 15333 - protein, 59 aa, Artificial Sequence
  Synthetic
SMKELIKRVKDLVDEVRKKVERLIEEVSKLVDDVKRHIRELIETVKRLVKEVADLLRAG

SEQ ID NO: 15334 - protein, 59 aa, Artificial Sequence
  Synthetic
EEARRLVEKVERDLKDIVRRVEELSRRNVERLKEIVKESRELVKEVVERLKRIAEEVTT

SEQ ID NO: 15335 - protein, 56 aa, Artificial Sequence
  Synthetic
KEKEDVKRRLEELIRRLEEHSKKVKRDLERVIKELDDEVRRVKERHEDVIRRLKDR

SEQ ID NO: 15336 - protein, 55 aa, Artificial Sequence
  Synthetic
DDVVRRVKELLRRVLEHTRKVVEDVRRLLKRIREKLEEISRKLDELLRRIEEKRR

SEQ ID NO: 15337 - protein, 58 aa, Artificial Sequence
  Synthetic
DREDEVRKDIERIERELRRVVDELRKEVEDSMRKLDEEVKRLEEHIRESVERLEERVS

SEQ ID NO: 15338 - protein, 55 aa, Artificial Sequence
  Synthetic
EKVLRDLKRVVDEVRKELKDVLDRHNKVVREVERKLEEVIDKHRKAVEKVKRDAK

SEQ ID NO: 15339 - protein, 59 aa, Artificial Sequence
  Synthetic
SREEELKKEVERLVREAEKHVEDNRKHVEDSVRELEKLVKELADKARESADRLDKKVKE

SEQ ID NO: 15340 - protein, 55 aa, Artificial Sequence
  Synthetic
ERVLEELKRVVDDIRKKHKDILKRHRDVVRKVEKELRDILREHNEVIREVKDKLE

SEQ ID NO: 15341 - protein, 60 aa, Artificial Sequence
  Synthetic
SEVERILKEAKRRLDEVVERLRKSAETLRRMLERVSRELKKSHDELDRVLRRVEDALRKR

SEQ ID NO: 15342 - protein, 56 aa, Artificial Sequence
  Synthetic
AEELRKEVEDMVRDLERLVREHSDRVRKIVTDLDRLVKEHNEEVRKIVERLDEEVK

SEQ ID NO: 15343 - protein, 60 aa, Artificial Sequence
  Synthetic
SELDEILERLKEVLERVKRKLEESNRRLEEVLDRVLKKLTESVKRLEDELRRVLKELREN

SEQ ID NO: 15344 - protein, 56 aa, Artificial Sequence
  Synthetic
IEEIKKDVERIVRELEDLVRRHEKRVEDIVRELEKIVRDHNERLKEIVRRAEEDVR

SEQ ID NO: 15345 - protein, 60 aa, Artificial Sequence
  Synthetic
RELEEILKRLEEVLERVLRELRKSVERLRKELERVLKELRDSNRKLDKVLREVLEELRKK

SEQ ID NO: 15346 - protein, 56 aa, Artificial Sequence
  Synthetic
AEDLERRVKEIERRLKRLVDEHNRRLREIVRELEEIVKRHKERVEEIVRELKRRVD

SEQ ID NO: 15347 - protein, 60 aa, Artificial Sequence
  Synthetic
SELDDIVRRLDEMLKRVEDELRKSDERLDELLKRVKKELEKSNRDLERALREVLKELEDR

SEQ ID NO: 15348 - protein, 56 aa, Artificial Sequence
  Synthetic
ARELEEEVERIVRELEKLVEEHKEELERLARKLEEIVRRHEERVRRIVKELEDRVK

SEQ ID NO: 15349 - protein, 60 aa, Artificial Sequence
  Synthetic
RELDEILRRLREELKRVREELEKSLKRLEDELRKVEEDLRESNERLERMLERVLRELRKR

SEQ ID NO: 15350 - protein, 56 aa, Artificial Sequence
  Synthetic
VDELRKELEKIAREAREYVKRNKDDLRRIVEELRKIVKKHKDKVEEDVRRLKKDVD

SEQ ID NO: 15351 - protein, 56 aa, Artificial Sequence
  Synthetic
RELEEILKKLEEVVRTVEELHKRTNEKLEKAVDEVRELHRKTNEDLKRAVDEVEKA

SEQ ID NO: 15352 - protein, 56 aa, Artificial Sequence
  Synthetic
KDRLDEEVKRLVEEARRSVEDDDRNIRRLVEEAKDSVRRDEETIKKLVDELREATR

SEQ ID NO: 15353 - protein, 56 aa, Artificial Sequence
  Synthetic
SDLERILKRLREVIKRAEELHRKTNEEDERVVREVIELHRKTNEDLREVIERVARG

SEQ ID NO: 15354 - protein, 56 aa, Artificial Sequence
  Synthetic
KEELRKAVEELEEKLERSVREDKKTSDDSARRAKKSVEDDRRTIEKLVEEAERSRK

SEQ ID NO: 15355 - protein, 61 aa, Artificial Sequence
  Synthetic
KDLEKLLDDIRKVLEEVTRRLKRISDELRRVLEEIKKRLDKDNEDLKRVIDEVKKLLDKKV

SEQ ID NO: 15356 - protein, 56 aa, Artificial Sequence
  Synthetic
REEIEKEIRDVEEELRRAVEENAELVKRVKEDAERVVRDSEKKSKEVAEELKDAVR

SEQ ID NO: 15357 - protein, 57 aa, Artificial Sequence
  Synthetic
SELEKILKELKDASREVEKRLRDILREDKKMLKKVVEELEEILRRLDEEVKKVKERL

SEQ ID NO: 15358 - protein, 60 aa, Artificial Sequence
  Synthetic
REEVVDRAKKEVDDHVKKAEDVVREVEKRSRESVKRLRDIVEELERLVKRLVDEAEREVK

SEQ ID NO: 15359 - protein, 60 aa, Artificial Sequence
  Synthetic
SETEKLLEEVRRIIEEIKKRIDRSLEEVRRSVEEAKRRIEKSLEDVEKSVRRVKKILDEG

SEQ ID NO: 15360 - protein, 56 aa, Artificial Sequence
  Synthetic
DRVLKEVEDLAREVKKRIDEVDKRVAELHKEVEDRLREVDKTVEELHRRVKKRADD

SEQ ID NO: 15361 - protein, 60 aa, Artificial Sequence
  Synthetic
SIEDVEREVKRLIERTKRHNDRVLETIRRLLEETKKHNEKVLREIRELIKRVEDTMRRRG

SEQ ID NO: 15362 - protein, 59 aa, Artificial Sequence
  Synthetic
EETIKRLLDEVREYVRKSEEDSERLLRDVERYVKESKERSERILKEARRLVKEVEDKIR

SEQ ID NO: 15363 - protein, 59 aa, Artificial Sequence
  Synthetic
SIEEVLEEVRDLLRKTKEDTKRILDEIRRLLEETKKRLEEVLREATKLLREVEDLVRKS

SEQ ID NO: 15364 - protein, 59 aa, Artificial Sequence
  Synthetic
EEEVKRLLEKARKLVEESKRESKEILDRARKYVKESLEEIERLLDELRKLIEELRRRIE

SEQ ID NO: 15365 - protein, 59 aa, Artificial Sequence
  Synthetic
SSEEILKEVKELIEESNRASEEVLKEVKKLLDESKKRSDEVLEEVERELKRLEESASRI

SEQ ID NO: 15366 - protein, 53 aa, Artificial Sequence
  Synthetic
VVREMRRLVEEDKRRIKEALDRLRKLVEDDKRRIEEVLREMRELIRELEERIR

SEQ ID NO: 15367 - protein, 61 aa, Artificial Sequence
  Synthetic
KEIEDILERLKETIKEIEDHIRRDLEELKKVIEELKRSLEEWKKRAERLIEELERLIRETG

SEQ ID NO: 15368 - protein, 56 aa, Artificial Sequence
  Synthetic
ERVLREAEERIRRLEEKLKEVNKRSEEMLRRLKEEHERVLREVKELIREIDDKARK

SEQ ID NO: 15369 - protein, 59 aa, Artificial Sequence
  Synthetic
GEDEVLRKVEKLLREVKERAEKSVERVERLLKDVEDKLKESHDRAKRLLEEVKKAADRG

SEQ ID NO: 15370 - protein, 56 aa, Artificial Sequence
  Synthetic
LKDLDRRIEEVVKRLEDEVRRHTKEVEEMVKRLRELVREHTERVKKIVEDLKREVD

SEQ ID NO: 15371 - protein, 59 aa, Artificial Sequence
  Synthetic
SEVEDVERRIREIIERLRRIVERHKEEVKKIIEKLEKLVRDHTERAKRIIERLKEVVDR

SEQ ID NO: 15372 - protein, 56 aa, Artificial Sequence
  Synthetic
EEVLKEVERLLEEVKELVERSHKEAEDLLKRVLDAMKRSVDEVEKLLEELKRRADK

SEQ ID NO: 15373 - protein, 59 aa, Artificial Sequence
  Synthetic
SKVEKVEEDIDKIIRRLEELVEEHRTEAEKTVKKLDDDVRRHNEKVEKIIRDLEEVVRR

SEQ ID NO: 15374 - protein, 56 aa, Artificial Sequence
  Synthetic
RKVLEDAKRLLERVMDEVRRSNEELKKLLEEVKRKLKKSVEDAERLLDEVRKRVEK

SEQ ID NO: 15375 - protein, 59 aa, Artificial Sequence
  Synthetic
SEVEEVDKRIREIVTTLKRLVEEHNDRARKIIEKLRRLVKKHEDEVEEIVRRLDEAVER

SEQ ID NO: 15376 - protein, 56 aa, Artificial Sequence
  Synthetic
EEVLKKVKELLKEVKRRLERSLEELERLLEEVLKLMKESNDKAKELLERVREKVER

SEQ ID NO: 15377 - protein, 57 aa, Artificial Sequence
  Synthetic
DFVERVKEEIKRIVERLKRLVKEHEDEVKRILDELRKLVETHKELSKDSLRKLEEVG

SEQ ID NO: 15378 - protein, 56 aa, Artificial Sequence
  Synthetic
ERVLEELRRLVKEVKERADRSSEKLNELLRKAEEDAKRSSEENNRRLEEVERRVRK

SEQ ID NO: 15379 - protein, 60 aa, Artificial Sequence
  Synthetic
DEERKIEEIIDKSRRDWERLLREAREIIKRSEDEWRELLERIKRLIEETRKRAKDLKKAD

SEQ ID NO: 15380 - protein, 59 aa, Artificial Sequence
  Synthetic
EEIRRLLEEMDKLSREASKRVEDILRELEERSRRMADEVRKLNEENKKLLEEAKKELKD

SEQ ID NO: 15381 - protein, 58 aa, Artificial Sequence
  Synthetic
DKEEIKEKLEELVERVVRELEKLLKELEDLSREVARRIKKIARDLEKLTKEVEEKLRR

SEQ ID NO: 15382 - protein, 56 aa, Artificial Sequence
  Synthetic
EEELERLIKELVDRARKLLEEVKKLIEDHREKLKRVLDEIKDLLRKHKETLDRTDT

SEQ ID NO: 15383 - protein, 58 aa, Artificial Sequence
  Synthetic
SKEDILRELRDRVERIKREIEKIFRDAKRLSEEVKRRIEDLLRKLKKVSDDVRERLAR

SEQ ID NO: 15384 - protein, 56 aa, Artificial Sequence
  Synthetic
EEELKELIKRLVEDAKRILEELKKLLDDHERKARRILERIEKLIKEHEDKARERER

SEQ ID NO: 15385 - protein, 60 aa, Artificial Sequence
  Synthetic
SEVEKLEEEVERSVRDLERELRDSEEKSKELMRRLDELVRRAKDHVRRSVEELRKTLSKG

SEQ ID NO: 15386 - protein, 58 aa, Artificial Sequence
  Synthetic
EEVRRILRDAERVIEEIKRRLEEDHKRLEEVIRRVEEKLRRILDEHDKVVKEIKEALR

SEQ ID NO: 15387 - protein, 60 aa, Artificial Sequence
  Synthetic
SEVEEAEKEVEDIMRRLKRKVEENKRHVDESVKEAEKLLRDSETRTRDIARRLKEELDKG

SEQ ID NO: 15388 - protein, 58 aa, Artificial Sequence
  Synthetic
KELTRILTRLREVIERVKRALEKSHDDHRRAVEEVRKELKRDHDDLRRVIEKVRRDLK

SEQ ID NO: 15389 - protein, 60 aa, Artificial Sequence
  Synthetic
SEVEEAKRRVDDIVRKLEELLKDSRRESERIMRELKRLLEELKRHVEDSVRKLREVLSRG

SEQ ID NO: 15390 - protein, 58 aa, Artificial Sequence
  Synthetic
RELREILRRAKEVIDKIREDLERDHDRLREVIEEIKKTLDRIHEEHRRVVKEVEDTLK

SEQ ID NO: 15391 - protein, 60 aa, Artificial Sequence
  Synthetic
SEVEEAEKEVREIMKELDKLLEDSKRESDDIRRDLDRVLEENKRHVDKSVTDLERVLSRG

SEQ ID NO: 15392 - protein, 58 aa, Artificial Sequence
  Synthetic
KELRRILRELEEVIKRVERTLREDHKELKRVIDRMKEDLERSHEEHERLVEEVERKLR

SEQ ID NO: 15393 - protein, 60 aa, Artificial Sequence
  Synthetic
SEVEEAKKDVERIMRELEKLVRDNKKHVDDSVRKLKKLLDDLRKHVEDSREELERVLRRG

SEQ ID NO: 15394 - protein, 58 aa, Artificial Sequence
  Synthetic
RDLRKILEDLERIIRRVEEELRRSHERHKEVVDRIKKVLDEIHRRHREVVKEVEKELR

SEQ ID NO: 15395 - protein, 60 aa, Artificial Sequence
  Synthetic
KEVEEAEDKVRRIVEDLKRKLEDLERHVEESVRRLEDLLRRSKKKSDDIMEKLTRTLSKG

SEQ ID NO: 15396 - protein, 58 aa, Artificial Sequence
  Synthetic
KELRRILKRMKDAIERVERELRRIHTRHKEAVDRVREELKRNHDELAKVIRKVREDLK

SEQ ID NO: 15397 - protein, 60 aa, Artificial Sequence
  Synthetic
DEVERADEDVERIVRELRRVLEENRRHVKESVERLERLVRKSKKDSKKIMEDLKRVLDRG

SEQ ID NO: 15398 - protein, 58 aa, Artificial Sequence
  Synthetic
TELRKILKKMKDAIREIKRTLDESHREHRRVVEEVKEELERNHKELKEVIDKVAKDLE

SEQ ID NO: 15399 - protein, 58 aa, Artificial Sequence
  Synthetic
DEVEDILRRVREAVERARESLERIHREHKKVVDEVRKALEKVLEDHARVVDEFRRKSG

SEQ ID NO: 15400 - protein, 56 aa, Artificial Sequence
  Synthetic
KDELKKEVEKLEEELKKELKRLKDHVKKSKEDLRRKLEDLKRHVERSVKRAEEEAR

SEQ ID NO: 15401 - protein, 58 aa, Artificial Sequence
  Synthetic
SEVEKVLRDLERAVKEVSERHRRNHEELRKVIKRVKEEHDRIHDEHRKVVEDLKRKIG

SEQ ID NO: 15402 - protein, 56 aa, Artificial Sequence
  Synthetic
REEIKKEVDRLKKELDENLKRLERDSERLKKELEDNLKRLEEHVRRSKEEAERDAK

SEQ ID NO: 15403 - protein, 58 aa, Artificial Sequence
  Synthetic
SDLEEVLKRLEDVVRRLEEELRRIHKEHRDVVRRVTEEHKRILEELKRVVERAREKDG

SEQ ID NO: 15404 - protein, 56 aa, Artificial Sequence
  Synthetic
RDRVTKEVRDLEEELRELLERLRAHVKRSEKKIEENLRRLEKRVEDLKKKIDDRTR

SEQ ID NO: 15405 - protein, 58 aa, Artificial Sequence
  Synthetic
RELEDIKRKHKKVVDDVREKLKESHRRLKEVIEEARRRLDEVRKKLEKVIREILTSAG

SEQ ID NO: 15406 - protein, 56 aa, Artificial Sequence
  Synthetic
IEDLKRYVEEVKRDLDDLIRRSEELVRRIKEDLDRALKELEELVRRIKKKLEEDRK

SEQ ID NO: 15407 - protein, 60 aa, Artificial Sequence
  Synthetic
SELDELRERVERHSRELRRTLEEAKKLVDDHKRTLREVLERIKKRVEDVKRELEKLVRDG

SEQ ID NO: 15408 - protein, 59 aa, Artificial Sequence
  Synthetic
REELKKIIDELRRVNEEAAKTLDEIIKRLEDVNREVNRTSKEVIDRLRKVLEEAERRTK

SEQ ID NO: 15409 - protein, 60 aa, Artificial Sequence
  Synthetic
EELDRIRKEVEDHERKLREVVKDIERKVEEHAKRLKKVIEDDERRVKEWKDTLEELIRRG

SEQ ID NO: 15410 - protein, 59 aa, Artificial Sequence
  Synthetic
KDEVRRVIKELRDVNRKVADALRKVEEKLKRVNDEMNKESKRTLDELDKALEEAERRAR

SEQ ID NO: 15411 - protein, 60 aa, Artificial Sequence
  Synthetic
DLLRELEARVRKHKRDLEEVLKKIEEEVRRHKKKLEDVLEELRRLVEDLMRELKELLEKG

SEQ ID NO: 15412 - protein, 59 aa, Artificial Sequence
  Synthetic
REELKRIIDELREVNERVNDESRKVIKELRDANKEADKKVRDIIRRLEDILRKAAEDTR

SEQ ID NO: 15413 - protein, 60 aa, Artificial Sequence
  Synthetic
KDLERLEKEVKEHKEDLERIVREAEKLVEDHERELEKVLRELEKTVRDVKRELEDLLRRG

SEQ ID NO: 15414 - protein, 59 aa, Artificial Sequence
  Synthetic
KEEVDRVLDELRKVNKKAADDLERVIRELEDVNRRVNERSREIIETLKRVLDEVREKTR

SEQ ID NO: 15415 - protein, 60 aa, Artificial Sequence
  Synthetic
DELRELKRKVDEHTRELERILKEIEDRVRRHKEKLDETVKRDKDRVDEWLRRAEELVRRG

SEQ ID NO: 15416 - protein, 59 aa, Artificial Sequence
  Synthetic
REEVEKIERRLREANKRAADALKKVIDELRRANEEVNRKSEETLKTLDKILEDVERKTR

SEQ ID NO: 15417 - protein, 60 aa, Artificial Sequence
  Synthetic
DDLERLAEEVKRHSEDLDRIVEEIRDRVRRYKEKLDEVVKEDEKRVREWRDRLEKLVRAG

SEQ ID NO: 15418 - protein, 59 aa, Artificial Sequence
  Synthetic
KDELDKIITRLEEANRKAAEDLRRVVEELRKAHEEMNRKSEKTKKDLDEVLEEAERRTR

SEQ ID NO: 15419 - protein, 60 aa, Artificial Sequence
  Synthetic
DDLERLKRRVEEYRRKLEEVLKTIEEEVRRYKKEAEKVLDEDRRRVEDWKRKLDEMVRRG

SEQ ID NO: 15420 - protein, 59 aa, Artificial Sequence
  Synthetic
EEDVRRIIDELRRVHKRANEDSKRVVDELRDVHRKVNETSEETKKRLDKVLKEAEDRTR

SEQ ID NO: 15421 - protein, 60 aa, Artificial Sequence
  Synthetic
KKLDDIRREVERLTDKLEKIVKRIKELVDRYRRKLERVLEEDDRRVKEWKRRMEELLRRG

SEQ ID NO: 15422 - protein, 59 aa, Artificial Sequence
  Synthetic
KEEVDKVLKDLDRALKKAADDLKRVIDELREVHERINRTSERTLTKLDRALEELEKRLR

SEQ ID NO: 15423 - protein, 60 aa, Artificial Sequence
  Synthetic
KELDEIRELVKRHKDKLKKIVDEVKERVDALKRKLKEILDEDRERVKKWVRDMEELVRRG

SEQ ID NO: 15424 - protein, 59 aa, Artificial Sequence
  Synthetic
KEDVDRVIRDLERVNEEANRRAKKVIDELRRVLEEAERTLRKTLEDLDRALEELARATK

SEQ ID NO: 15425 - protein, 58 aa, Artificial Sequence
  Synthetic
DEAEKILEELRKVVRELEEELRRNHEELKRVIEDVERKLRESNRRVEKVIKEVTDEKG

SEQ ID NO: 15426 - protein, 59 aa, Artificial Sequence
  Synthetic
EDVVRELEKLVEELKRRVTEVVETVARDSERLREELRRIVEESKRLVEELKRRAEEASR

SEQ ID NO: 15427 - protein, 61 aa, Artificial Sequence
  Synthetic
SELERVVEDLRRAAKKLADDLKRVIEEHRKYARDNKERLKKVLERLKRLAEELKKELERDG

SEQ ID NO: 15428 - protein, 55 aa, Artificial Sequence
  Synthetic
REVLEDVRRLIEDLERLITELRKENERVIRESEKLSRDIEREVERVIRELEETIR

SEQ ID NO: 15429 - protein, 56 aa, Artificial Sequence
  Synthetic
KEVEDVKREIDKVLEDARRLLKESDDTLKKILDKARRDLEESDRRLKEILDKVRKD

SEQ ID NO: 15430 - protein, 56 aa, Artificial Sequence
  Synthetic
FEELKDTVDKLRREIERRITESRRHVEELRRRVEEMLERSERNVREAEKKLEEDKK

SEQ ID NO: 15431 - protein, 57 aa, Artificial Sequence
  Synthetic
DEVERVEEELKKSDDELRRRMEEVKRALDKDNEDAKRMLDEVKKELEKILRKVEKEV

SEQ ID NO: 15432 - protein, 60 aa, Artificial Sequence
  Synthetic
KKEVVERLDKLVKEHHERNKRIVEEAKRLVEDSREKTRRIAERAKELVRRLKELVDRLSK

SEQ ID NO: 15433 - protein, 58 aa, Artificial Sequence
  Synthetic
DRIEDVKRKVKEIKEKVDRLLEESSKKVDDLNKKVRDLLTESNKRIEDIVRELRELAK

SEQ ID NO: 15434 - protein, 58 aa, Artificial Sequence
  Synthetic
EEAKEVLERLKRILEESRRASEENKKKLEKSHEELKRASDENKRKLERILDELREALR

SEQ ID NO: 15435 - protein, 56 aa, Artificial Sequence
  Synthetic
SAKEKIDKTLKDIYRKHEEVVRRVEKKHRDIHREHEEVVRRVEEEHRRILDELRKA

SEQ ID NO: 15436 - protein, 56 aa, Artificial Sequence
  Synthetic
EEEAKKFLDKLDKEVRDSMKRLEDHVRETKKRVEESVRRLEEHVKRTEEEVRETAT

SEQ ID NO: 15437 - protein, 56 aa, Artificial Sequence
  Synthetic
SVEDEVRRDLKRIYEKHEEAVRRVEERHERSNERLEDVIRKVEDKHREILKKLEDE

SEQ ID NO: 15438 - protein, 56 aa, Artificial Sequence
  Synthetic
EEDVKRVLDKLDEEVKDSVRELEEHVEKNERDVEEIAKDLERHVEETRKEVDKTAK

SEQ ID NO: 15439 - protein, 56 aa, Artificial Sequence
  Synthetic
KVEEKVRETLRRIYERHRKIVKEVEEKHRESNERLRREIERVKRKLDEILKKLEEA

SEQ ID NO: 15440 - protein, 56 aa, Artificial Sequence
  Synthetic
EDRVAEVLKKLKDDVDKSAEELERHVKRNRDEVRKIVEDLDRVLEELRTKVDEEAR

SEQ ID NO: 15441 - protein, 56 aa, Artificial Sequence
  Synthetic
SVEDKVRESLERIYKKHEKVLRDVERTLKEIHEEHREAVERVRRELERIKRKLEEL

SEQ ID NO: 15442 - protein, 56 aa, Artificial Sequence
  Synthetic
DKDVERVLKKLDDDVRKSVKELTDVLKRLREEVKRSVEELEDVLRKLDKEVDDTAK

SEQ ID NO: 15443 - protein, 56 aa, Artificial Sequence
  Synthetic
DVEDRIRKSLEEIYRRHETEVRKIKRKHDESHRRHEKVVREVTEDLERIKRRLEEL

SEQ ID NO: 15444 - protein, 56 aa, Artificial Sequence
  Synthetic
EEDAKRVLDELEEKVRRSVKKLREHVEENEKRVEDSVEELKRILEELRKAVDETTR

SEQ ID NO: 15445 - protein, 59 aa, Artificial Sequence
  Synthetic
SKKDEVEKLLKESERHSKKLVEDAKRLSDESKKHVEELVRRAEEELEKSDRDVKKVKDD

SEQ ID NO: 15446 - protein, 59 aa, Artificial Sequence
  Synthetic
EEVMDRVRRRLERDIRELRKALKRVEDTNEEITRELEKAMKEVKDTSDRILEKLRRARK

SEQ ID NO: 15447 - protein, 60 aa, Artificial Sequence
  Synthetic
SVKDKLKELLKDSKRNSDRLVERAKELLDRSRKHSKELEDRARKLLEDSRRKVEELERAN

SEQ ID NO: 15448 - protein, 59 aa, Artificial Sequence
  Synthetic
REVLEKARRDLERDLRENKKALDEVRRTLEEDSRRLREVLEEVKRISTKIIERLREIRR

SEQ ID NO: 15449 - protein, 56 aa, Artificial Sequence
  Synthetic
SEKEDAEKKLRDILTDLARIVREVEEALKKILDDIRKVSEESKRASDESLKRARDA

SEQ ID NO: 15450 - protein, 56 aa, Artificial Sequence
  Synthetic
GEELEELLRRLEEAVRRIAERLRKLLKELEEKARRLAEESKKLLEKDKEDVKRAAE

SEQ ID NO: 15451 - protein, 56 aa, Artificial Sequence
  Synthetic
SEKERIKEESKKSLDDLRRASERSKEELDRILKRIDEASKRSKEESDRSLKEVKDR

SEQ ID NO: 15452 - protein, 56 aa, Artificial Sequence
  Synthetic
GEELKDVLRELRETNRKLVEDSRKLLEELDRDVERLADESRKLLEDDKRKVREVAR

SEQ ID NO: 15453 - protein, 56 aa, Artificial Sequence
  Synthetic
SDEERIDELSKKSLEDLKRVSDDSKRKLDDILKKIEDASRESEDKLRRILEKARRD

SEQ ID NO: 15454 - protein, 56 aa, Artificial Sequence
  Synthetic
GRELERILEELRTDNDRLAKESDKLVKELEEEVRELIKRSETLLEELRKDVEELAK

SEQ ID NO: 15455 - protein, 57 aa, Artificial Sequence
  Synthetic
DAKERVDDALKKILDDHRRVLKKVEDDHRDSHREHRRVVEEVKRELEKVLKKLRDAG

SEQ ID NO: 15456 - protein, 56 aa, Artificial Sequence
  Synthetic
KEDLDRMLEKLREIVERSRDKLRRHLEKNKREVDDSKRRLEKMLRDLEKKVRDAER

SEQ ID NO: 15457 - protein, 57 aa, Artificial Sequence
  Synthetic
DDEERVKRKLEEVLRKHKEVVDEVIERHRRSHKRHRDMLREVDKKHRRILTELEKAG

SEQ ID NO: 15458 - protein, 56 aa, Artificial Sequence
  Synthetic
VEDLKRVLEDLDREVRESKERARKHVEDNERKVEESKKRADDNLRRLERKIREAAR

SEQ ID NO: 15459 - protein, 57 aa, Artificial Sequence
  Synthetic
SVEETVDEELKKIHETHKRVVDKVRREHEKSHKKHRDILKRVEEVHRRILTDLERAG

SEQ ID NO: 15460 - protein, 56 aa, Artificial Sequence
  Synthetic
KKDLDEMLRRLKRKVDESERDLKKHLDDNKRAVEKSREDAERNLKELRDKIREVKR

SEQ ID NO: 15461 - protein, 63 aa, Artificial Sequence
  Synthetic
REEEEARKVLEELKRDVERNERESKEILDKDKRDVEEWVKELEKMLEESKKLVDDVRKAKKDL

SEQ ID NO: 15462 - protein, 55 aa, Artificial Sequence
  Synthetic
EELKKAVEDIIRTLREVLEKSRKTLKDSNDRLRRALEKAREDSKRSIRRLREELR

SEQ ID NO: 15463 - protein, 59 aa, Artificial Sequence
  Synthetic
SVREDAKRLLEELERAVRELVERLKKLIERHRRASEDTRRELEKLLRELEKAVEELKRG

SEQ ID NO: 15464 - protein, 58 aa, Artificial Sequence
  Synthetic
KALEDVKEALDRILERVKRAIEEARKKLDDVDEHNREVIERVEKEIDRILKDVEDAAR

SEQ ID NO: 15465 - protein, 59 aa, Artificial Sequence
  Synthetic
SVEEEARELIERLRKLSEDTMRRLTELLKEHERLSRETKKEAERLLDELRKKVDDLTRD

SEQ ID NO: 15466 - protein, 58 aa, Artificial Sequence
  Synthetic
EVLERVKRELDRILDHNKKVVDEAERALRRVDKHNEDVLREVEKTLERILDKVKESAR

SEQ ID NO: 15467 - protein, 57 aa, Artificial Sequence
  Synthetic
SVEEKLEKIVRDLERRVRKSEEDLRRMVEEVERTVEKHREELKRVVDTLRKIVRDKG

SEQ ID NO: 15468 - protein, 59 aa, Artificial Sequence
  Synthetic
EKVARDIKDKVREIIRRNEEVLEEVDRRARELIERLERTIEKSERDVERIIRELRERAK

SEQ ID NO: 15469 - protein, 59 aa, Artificial Sequence
  Synthetic
SKEEEAEKLVRDLEDSSRKHKDRLRKLVRDLEELVKEHERDLKRIVEELKKLVDDASRS

SEQ ID NO: 15470 - protein, 55 aa, Artificial Sequence
  Synthetic
KELEEELRRNLKEVREVTEDAKRKLRDILRKVEDASRRVKEMLDKILKRVEEEIR

SEQ ID NO: 15471 - protein, 57 aa, Artificial Sequence
  Synthetic
KLDEDIRKLLKEALDRNKEMLERLKKTLDEALEKVKKLLEDLRRVNKEVEDELRRAG

SEQ ID NO: 15472 - protein, 59 aa, Artificial Sequence
  Synthetic
EDVLREVIRRIRKVIEDTDRTWKRLIDEIRKEVKDVLDKARRLIRESEKLMEDIKRRTK

SEQ ID NO: 15473 - protein, 56 aa, Artificial Sequence
  Synthetic
DMEKRIEKLLKDMLDRVRELHKRVREVNKEVNKRVKELHDEVRKVNEKVNKAVKDR

SEQ ID NO: 15474 - protein, 59 aa, Artificial Sequence
  Synthetic
EEVLARVIERIRKDVEKVLREAEKHIEESRRLARKVLEELRRHIEENRRLLEEVDRRRR

SEQ ID NO: 15475 - protein, 57 aa, Artificial Sequence
  Synthetic
EVEKKVEELLKRIEDDNKRVADRSRKLLRELKKRLEDVVRESRELLRRILKKLKEAG

SEQ ID NO: 15476 - protein, 56 aa, Artificial Sequence
  Synthetic
EDEVADRLRKLRKESEEVVERSDRHLKDLERRIEEMAERSRRHLKRLEDKIREDAR

SEQ ID NO: 15477 - protein, 59 aa, Artificial Sequence
  Synthetic
SMEDRVREMLRTIKRVIEEAHERSKKILDEDRKVLKAVEDAVRDVLTKIKKLLDDARRR

SEQ ID NO: 15478 - protein, 55 aa, Artificial Sequence
  Synthetic
EEVVKRAKKLLEEIEKLARESLERLRDNLRKTEKLLKDLLDEAKRLLEEIKETVD

SEQ ID NO: 15479 - protein, 60 aa, Artificial Sequence
  Synthetic
DIEEEVKKILDEIRERIKKMKRDLERLSKEDEDVLRKVKKDVDEVLKRAEESLRDVKRRG

SEQ ID NO: 15480 - protein, 55 aa, Artificial Sequence
  Synthetic
EEVLRKLEEILRDIKRKADELRKRYRENIEETERLLEELLRRAEELLRRLDETAR

SEQ ID NO: 15481 - protein, 61 aa, Artificial Sequence
  Synthetic
SEAEKLLEDIRRIIKEVKENVERSLEKIKRLIEELEKNARDLVRRIRKLIEDLERKVRRDG

SEQ ID NO: 15482 - protein, 59 aa, Artificial Sequence
  Synthetic
EKVIRDIEKLIEDLKRISEKANEDNKRLIDDMRRISKEVARTIKELIERLRKIVEEARK

SEQ ID NO: 15483 - protein, 61 aa, Artificial Sequence
  Synthetic
SEAEELLERIKKLIEDLKRDAERLLREIEEMIKDIRRHVEEDLRRLREVIKEIKRLVDERG

SEQ ID NO: 15484 - protein, 59 aa, Artificial Sequence
  Synthetic
EEVEREIRRLIEEMKRISEEVRKEIKRLIDELEEIVRRAKEALKKLNEELKRIVDEAKR

SEQ ID NO: 15485 - protein, 59 aa, Artificial Sequence
  Synthetic
SKVEEVLKRLERLIRELKRLMDEVREDNREVLERLERYAERNERENRELLKKLEDVARR

SEQ ID NO: 15486 - protein, 56 aa, Artificial Sequence
  Synthetic
KEELDKMLKTAERVLREIEKDIEKLDRDLKRVVERIRDRSRRLDEAAEEIVRRIED

SEQ ID NO: 15487 - protein, 59 aa, Artificial Sequence
  Synthetic
SKMEEVLKRLEKLLRELEEYVERNERENRKLLEELEDYVRRNEKRNKEILEELRDVVRR

SEQ ID NO: 15488 - protein, 56 aa, Artificial Sequence
  Synthetic
DEELRKALERLRRVVEKVEDISRELDDRLRRVVEKAEEISRRLDEEIKEVVDRAEK

SEQ ID NO: 15489 - protein, 59 aa, Artificial Sequence
  Synthetic
SKVEKVLDDMRRIIEEAERLLEEVKRRHDEIIERVKRYAEENRRRNEELIEDLKRVAEK

SEQ ID NO: 15490 - protein, 56 aa, Artificial Sequence
  Synthetic
KDDVRRLLEELRKVVEDVKRLSKKMNDRIEKIAKEIEEESERLDRTIAEIVKEIEK

SEQ ID NO: 15491 - protein, 59 aa, Artificial Sequence
  Synthetic
DEVEKVLEELRRLLKEDEDIVRELLKRLKELLEDIDRIAKETEKEWRKILREIEELRRK

SEQ ID NO: 15492 - protein, 59 aa, Artificial Sequence
  Synthetic
EDAEREVDRVVRTIEESTKDAREKVKRMADEIERIIKEVEDLNRKLVEEIERVIREVER

SEQ ID NO: 15493 - protein, 56 aa, Artificial Sequence
  Synthetic
DSEETLRELVKTIEDSSRKVKKRNEELARELRRRIEEAREANDRLVETIRKEIREL

SEQ ID NO: 15494 - protein, 56 aa, Artificial Sequence
  Synthetic
REELEKTARKLIEDDEKKARDTEREWEELIRDIERLVRESLEAWKRLREEIRETVR

SEQ ID NO: 15495 - protein, 56 aa, Artificial Sequence
  Synthetic
KSEEELRKLVRELEELIERMERTNEKLLRELKEVLDRARERNEELVRRLEDLIRRL

SEQ ID NO: 15496 - protein, 56 aa, Artificial Sequence
  Synthetic
EEELRKEAEDLIREIEEKVRRSKRNLEELIREIRELVERSEDEWRKLIKRIADAVK

SEQ ID NO: 15497 - protein, 56 aa, Artificial Sequence
  Synthetic
SSEETLERLLREIERVLEEARKRNEDLVRKIREVIKEALERNKRMLEEIKKEIDRL

SEQ ID NO: 15498 - protein, 56 aa, Artificial Sequence
  Synthetic
SEELLRTAKRLLEDIERIVRETLKKWRDLEREIRKLVRESTENLKRIIEEIRERAR

SEQ ID NO: 15499 - protein, 55 aa, Artificial Sequence
  Synthetic
SKVDEVIRDLARLLDELRRHVDDSVRRMDEVVKRSTREADELAKRLDELVKEVEK

SEQ ID NO: 15500 - protein, 56 aa, Artificial Sequence
  Synthetic
KEKIDRIIRELERILEEAKKKHEDVLRRLEDSLRRVAELLKAALDRLREIVDRLRR

SEQ ID NO: 15501 - protein, 55 aa, Artificial Sequence
  Synthetic
SKADDVIRKLRELLEELRTHVEKSIRDLRKMLEDSTRHAKRSIEELERLLEEVRK

SEQ ID NO: 15502 - protein, 56 aa, Artificial Sequence
  Synthetic
EEKLKDLIRKLRDILRRAAEAHKKLIDDARESLERAKREHEKLIDRLKKILEELER

SEQ ID NO: 15503 - protein, 55 aa, Artificial Sequence
  Synthetic
SKVEEVVRTLDELLKRLEEHVKESIRRIKKVIDDSNREADELIRDIDRLLKELEK

SEQ ID NO: 15504 - protein, 56 aa, Artificial Sequence
  Synthetic
KDRVERIIRELRRILEEIRDLHRKLEEELRRSLKEVEDRLRELLKKLEDILRELRR

SEQ ID NO: 15505 - protein, 59 aa, Artificial Sequence
  Synthetic
DEVEDLLRKLKDTIRRLKAHADRDLKKLEEILEKLRRHVEKNLRDLERILKELKDLSRT

SEQ ID NO: 15506 - protein, 59 aa, Artificial Sequence
  Synthetic
EEVAERVRRVIKELRKLLEEIARALEDVNKKAKEINDKADEDSKRVNDELKRIIKEIRD

SEQ ID NO: 15507 - protein, 60 aa, Artificial Sequence
  Synthetic
SEVDELRRRAEESSKKIRKIAEELTKRLKDLLETIRRLMRKIEEDMKRTSEEIKDLIRRG

SEQ ID NO: 15508 - protein, 59 aa, Artificial Sequence
  Synthetic
DRLRDVVKKLHKKNKDILDEIRDIVRRLKEEVDTILKEIKERLEELHKNNERLLREAKR

SEQ ID NO: 15509 - protein, 60 aa, Artificial Sequence
  Synthetic
SAKEKLEDLLRKLKRILDELEKTSREMKERVERIIRELEKTVREVHERIKRLIDEALKRN

SEQ ID NO: 15510 - protein, 55 aa, Artificial Sequence
  Synthetic
EELKKELEDLLRKIEKLIKESEEKWRRLLEEIKREIERLRETYAEILRDVKRRDK

SEQ ID NO: 15511 - protein, 60 aa, Artificial Sequence
  Synthetic
SAEETVRKLLEEIKEIIKRMEDRVREVLEENRKSIEDLEERVRRLHEEVERIIREALEDL

SEQ ID NO: 15512 - protein, 55 aa, Artificial Sequence
  Synthetic
DEVKRELKRILEEIEKLIEELLRRMKESNKKIRKLAEDLTREYKRLLDEIRKRRK

SEQ ID NO: 15513 - protein, 55 aa, Artificial Sequence
  Synthetic
REVEEVVKRAEEVIRRLEKEVEDIVRRVAKHLKDNEDHARRSVERLRRDIEELKK

SEQ ID NO: 15514 - protein, 56 aa, Artificial Sequence
  Synthetic
DELVKEVKKKIDDVLKKAEDLARKLKKEHDEVVARITEAHDEVKKRVEKVLKELED

SEQ ID NO: 15515 - protein, 55 aa, Artificial Sequence
  Synthetic
SKVEDVIREIRELIKRLEKHVKDSVREVRKHIEDNKRKVEKLVKEVEDVIRELRK

SEQ ID NO: 15516 - protein, 56 aa, Artificial Sequence
  Synthetic
RELAEELRRRLDEVLEKATRLHRELEKRHDDVLREAEKRLRDLKREIDKVLDDLRR

SEQ ID NO: 15517 - protein, 56 aa, Artificial Sequence
  Synthetic
EEVERVVKELRDHLAETKKKIDEIIKRLDDHIEENRERVERMVEELRRILKEIRDS

SEQ ID NO: 15518 - protein, 56 aa, Artificial Sequence
  Synthetic
REVVDEVRKEHRDVLREAEELIKRVEKDHEKSHREVKKLIEDVERRLREVLKELRD

SEQ ID NO: 15519 - protein, 56 aa, Artificial Sequence
  Synthetic
KEAEDTIRKVSKHIEDNKRKVEEMIKKLKEHLKETEEKIRRIVKKVRDEVRKLEEN

SEQ ID NO: 15520 - protein, 56 aa, Artificial Sequence
  Synthetic
EKLVRDLKRRHKESHDEARKLIEEVRREHEEVLKRAEDLIRELDKRLKEVLDKLRK

SEQ ID NO: 15521 - protein, 57 aa, Artificial Sequence
  Synthetic
SEAEEVVRRVEKHIRDTEKKIRDIVRRVKEEVDRNSERVREMVERVRKEIEELERAQ

SEQ ID NO: 15522 - protein, 56 aa, Artificial Sequence
  Synthetic
KEVVDELKKRHREVLEEARRLIEELKERAERSHRESKKLIDELREEIRRVLEERRR

SEQ ID NO: 15523 - protein, 57 aa, Artificial Sequence
  Synthetic
SEVEDIVTKLRDKVERHREEVKRIIDTLKKLVEEHKRRVDDEVKKLDDTVKRLREAN

SEQ ID NO: 15524 - protein, 59 aa, Artificial Sequence
  Synthetic
KRVDDLLREVEERLERSNREARKLLEEVKREMEESHRRLKKLLDEVREKVRRVVEELRK

SEQ ID NO: 15525 - protein, 60 aa, Artificial Sequence
  Synthetic
KVEELVKEVDERIKKVLDDLRRALEDVRKKAEDSVRRMEELSEKVKRDLDRVIAKAEEKG

SEQ ID NO: 15526 - protein, 55 aa, Artificial Sequence
  Synthetic
EEVVKRLEEILRRLKETIDRVLERLKRRVEDHDRKVEKRVRENEKAVEDLKRRID

SEQ ID NO: 15527 - protein, 60 aa, Artificial Sequence
  Synthetic
SVEEVLEEARKDIDRLIRRMEEISERAKEKIERLIDELRKISEEANKKNEEVLRELREKG

SEQ ID NO: 15528 - protein, 56 aa, Artificial Sequence
  Synthetic
REDIKREVDRLLEEIRRLIERLRENVKKLLDEIRKLIEELDENVKRSLKKLRDDIR

SEQ ID NO: 15529 - protein, 60 aa, Artificial Sequence
  Synthetic
SLDDILREVRRTSRELNEESRRIVDRAKRESEELLKELETILRDATRRLDDLLRKLDEKR

SEQ ID NO: 15530 - protein, 60 aa, Artificial Sequence
  Synthetic
RETVVKELEDKVREHLRTNRELIERLEKEMRDHLREIKRKIEELERRIRKLVEEVKRRID

SEQ ID NO: 15531 - protein, 61 aa, Artificial Sequence
  Synthetic
DELEDLVRKAEKLVRESEKKIKEIVDDARRLIEDSEREIREIVKKLRELSKRVEEELRRDG

SEQ ID NO: 15532 - protein, 56 aa, Artificial Sequence
  Synthetic
KDLLKELRDKSKRVLEKLRRLLEEINKRSRDVLEKLKRLADEVRESNREVLDRARK

SEQ ID NO: 15533 - protein, 56 aa, Artificial Sequence
  Synthetic
RELEEIVKDAERLVKKDTEDIRDKVRRAEEVVKKDTEDLEESVKRVKDKVKELEDA

SEQ ID NO: 15534 - protein, 56 aa, Artificial Sequence
  Synthetic
EELLREIEERIKRSLDESRKLVREIEKKVDESNERSRKLVEDVEREIEEVLKRLAD

SEQ ID NO: 15535 - protein, 59 aa, Artificial Sequence
  Synthetic
SSEDILREVKKLLDDSLDKLRRLIEKIKEDLDRSVDRHRKLSEEIRRRHERVREAVERR

SEQ ID NO: 15536 - protein, 55 aa, Artificial Sequence
  Synthetic
EDVARKLRELVREHSKEVEDKVRRAARLVEEHTERSDRVADKLRKHIEETKKRID

SEQ ID NO: 15537 - protein, 59 aa, Artificial Sequence
  Synthetic
SKEEILKEITDRVRESRKRTKKLLDDVREELERSHRRLEKLIREVEKRLREVKRKVDES

SEQ ID NO: 15538 - protein, 53 aa, Artificial Sequence
  Synthetic
VVRDLRRLVKEDTDRARKVVRELEREVERDKEEVERIVDKAEKKVRELEERIR

SEQ ID NO: 15539 - protein, 56 aa, Artificial Sequence
  Synthetic
DEVEKAVADLRRLNEEHTRDIDKAARDLERLVKKHTDEVRKLVRDLEKLVKDLKDA

SEQ ID NO: 15540 - protein, 59 aa, Artificial Sequence
  Synthetic
EKLEELLKEVEETTRRSLRRLEELLRKVERAVRESHKELKKLLDEVREKVKKVLEELRR

SEQ ID NO: 15541 - protein, 56 aa, Artificial Sequence
  Synthetic
DEVEKAVRDLEKLNEEHTRRVEKVVTDLRDLVRRHTEEVRKLVDELRELVERLRRA

SEQ ID NO: 15542 - protein, 59 aa, Artificial Sequence
  Synthetic
KKLEKLLDDVRKTTETSHERLKRLLEEVEERVRRSHEELKDLLRKVKELVEKVLRELKE

SEQ ID NO: 15543 - protein, 56 aa, Artificial Sequence
  Synthetic
SEVEKLAKELRDLVREHTKRVRELIDELKKRVEDHTRKVEEIVKRLKKLVDDLRDA

SEQ ID NO: 15544 - protein, 59 aa, Artificial Sequence
  Synthetic
KKLEKLLKEVRELVKRSHDELKKLLDRVREAVEKSKRRLEKLLDTVRRLLEKVVRDLER

SEQ ID NO: 15545 - protein, 56 aa, Artificial Sequence
  Synthetic
SEAEKLVEELRRLNERHTRRVEEVVRRLDEEVKKHRKDVRELVRELRKLVDELRKA

SEQ ID NO: 15546 - protein, 59 aa, Artificial Sequence
  Synthetic
EKLEELLREVEETTEKSHRDLKRLLDRVREKVEDSHKELEELLKEAKDRVDRVLEELRR

SEQ ID NO: 15547 - protein, 60 aa, Artificial Sequence
  Synthetic
SLEDKVRDDVRKLLAEAKKVADDLRKVVEDHRKTVEDVIREIRRRVEEHLKKLKELIDAG

SEQ ID NO: 15548 - protein, 56 aa, Artificial Sequence
  Synthetic
DRVLKRIEEEIRRLLKELREIVKDLERLDRELTDELRKLVEEVRRLSETVLDEARK

SEQ ID NO: 15549 - protein, 59 aa, Artificial Sequence
  Synthetic
SLDEDVAEKMKELEKENKDLLDTIRRLIEELEKHARELLKRIEDLIRELTEDAKRLEDS

SEQ ID NO: 15550 - protein, 56 aa, Artificial Sequence
  Synthetic
RRILEEIRRTNEELTERVRDLVEEMRKTSEELLKEVRKIADEVRRTVEEALKRLEK

SEQ ID NO: 15551 - protein, 61 aa, Artificial Sequence
  Synthetic
DEAEKILRDAKRLVEELSKKLEDNLREIKEVIDRLSEELDRNLKEHRDLIRKLEEDMDRKG

SEQ ID NO: 15552 - protein, 55 aa, Artificial Sequence
  Synthetic
EERAREVEEDIKRAEEEVERSIRESKKRTRDAEREVRESKKKSEDHIREVEKRIR

SEQ ID NO: 15553 - protein, 61 aa, Artificial Sequence
  Synthetic
SELEELLKELKEIVERSADHLRRSNDDLRKIIEEVTKTLEKILEDLKRIVEEVVDRARKKV

SEQ ID NO: 15554 - protein, 56 aa, Artificial Sequence
  Synthetic
EEELKKKLKELKDRAKETNERHRRDVERLMEKLRRDLERLDREVKDLEKKLREEEK

SEQ ID NO: 15555 - protein, 56 aa, Artificial Sequence
  Synthetic
SDREEIKRRVEEEAKKSRENLKETLREVDERVRDSERNLKRHHEEVKKAIDDLRRS

SEQ ID NO: 15556 - protein, 56 aa, Artificial Sequence
  Synthetic
KRILDDVRRLLEELKERYRRIVDEIKKLLERLKEAYKRNLDRVRELIERIEKEIRD

SEQ ID NO: 15557 - protein, 59 aa, Artificial Sequence
  Synthetic
SELEEVKERIERLVRRHKEELEKVRREIEREVKKHEKDLEDLERRSREHIETAERLLAE

SEQ ID NO: 15558 - protein, 56 aa, Artificial Sequence
  Synthetic
DRILEEARRLLDRLREENEKVLKEAEDMLKRLEDENRKMLEENEKLLKELKKEVDK

SEQ ID NO: 15559 - protein, 59 aa, Artificial Sequence
  Synthetic
SEVEEVLKTIEKKDEEHKRELERVKEEVDEDAKRHRERLKKVDRDVKEEIKRLRKLLED

SEQ ID NO: 15560 - protein, 56 aa, Artificial Sequence
  Synthetic
EKILEEIKRRLDELRKRNEDLLRRVKELLDELREENRRLLEDAKRLLEEVLKRARD

SEQ ID NO: 15561 - protein, 59 aa, Artificial Sequence
  Synthetic
SELEEVEKKVREDARRHKEELRRVEEEVKRNAEKHRDELRRVREDIERKIRTLRELLKE

SEQ ID NO: 15562 - protein, 56 aa, Artificial Sequence
  Synthetic
EEILRRVKKLLDELRDENRRLLERVRELLERLREENERVLREVKKLLDEVKREAEK

SEQ ID NO: 15563 - protein, 59 aa, Artificial Sequence
  Synthetic
SEREKLLKELKDNLDESRRRVEELLKRIKENLEEVKDRAKKTLDDLKRDIEELRKLVER

SEQ ID NO: 15564 - protein, 59 aa, Artificial Sequence
  Synthetic
EDVKRRLRDLSRRLAREHEKVIEKLRRLSDELEKIHREIEERLERLSDELRKEADKARK

SEQ ID NO: 15565 - protein, 61 aa, Artificial Sequence
  Synthetic
DEARELLKRLREINEKLKKDVEEIERRLEKYNRDVKRKLDDSIRELKEKLDRLRERIRDEG

SEQ ID NO: 15566 - protein, 59 aa, Artificial Sequence
  Synthetic
EDVRRAVEELVRRHKDTVKKIEESVRRLVEEHKRTVKEALDRSRRIAEEIKRVLDEAAR

SEQ ID NO: 15567 - protein, 60 aa, Artificial Sequence
  Synthetic
SEEEKLLTELKKLNDDLERRVRKSLDEIRRYNEKMREDVRRSDREVREEKKRLDEKLKKD

SEQ ID NO: 15568 - protein, 59 aa, Artificial Sequence
  Synthetic
EEALKKVRELVERHKRTVDEALEKSERLLREHERTVDEVLDRSRRAVEEVKKTLDDARK

SEQ ID NO: 15569 - protein, 60 aa, Artificial Sequence
  Synthetic
REAEEVRRRIEESHEEVRRRARKDERDLEESHKRLEEKAKELKDELRKILKDIDDLAKSN

SEQ ID NO: 15570 - protein, 59 aa, Artificial Sequence
  Synthetic
EDVLRDIEKLVRDNEEALDRILKRTKELVDRNLEAIDRILKEVEELVRRIKELLDRAKK

SEQ ID NO: 15571 - protein, 61 aa, Artificial Sequence
  Synthetic
SEVEEVLERLKRKLDEIERESRESAKKIRREIERIEKEARDSLRRLKKLIKEIEDRVRRDG

SEQ ID NO: 15572 - protein, 56 aa, Artificial Sequence
  Synthetic
REELEKLLKRLEEVVRESEKEIEDLLRRVRELIERIKREHEKILKEAEEVIRRVKK

SEQ ID NO: 15573 - protein, 61 aa, Artificial Sequence
  Synthetic
REVEEVLRELEEHIERSKRKSEESLKEIRRRIEEIEERSRRSLTELKKRIDDIKRRVEKDG

SEQ ID NO: 15574 - protein, 56 aa, Artificial Sequence
  Synthetic
KEDLKRLLDKVTEVHKESAKEIRKLLDEARKVIEDSLRAIRDILRKIKETIDRDKT

SEQ ID NO: 15575 - protein, 61 aa, Artificial Sequence
  Synthetic
EEVERVLEKLKRHIDDSRRKSKRSVDEIRKHIERSKRRSEESVERVKRELERIEEKVRREG

SEQ ID NO: 15576 - protein, 56 aa, Artificial Sequence
  Synthetic
EEELKKLLEEAEKVHRDSKRELRKLVKEARDVHRESMETVKRLLDELEREIRRAET

SEQ ID NO: 15577 - protein, 61 aa, Artificial Sequence
  Synthetic
SEDEEALKKLKEHIDRSREESKRSLDRVKREIERIREEIERDLRRLREELKKIEDRLRRDG

SEQ ID NO: 15578 - protein, 56 aa, Artificial Sequence
  Synthetic
EDELRKLLEDAKRVHKRSKDELKRLLEEAEKVIRDAKRKIKKLLDELRKVLEDARR

SEQ ID NO: 15579 - protein, 61 aa, Artificial Sequence
  Synthetic
DEVRRVLEELKEHIKRSEKRVRENEEEIRRHIEKSKRDSDESLKELARLIKKIEDDVRREG

SEQ ID NO: 15580 - protein, 56 aa, Artificial Sequence
  Synthetic
EEELKKILDEAEERHRRIEERHKDLLRKAEEVHRDSLRRLREILRRAEEVIRREKT

SEQ ID NO: 15581 - protein, 61 aa, Artificial Sequence
  Synthetic
KEVEEDLERLKKHTEDTRKRARDNLERIKEELEEIRKESEDSARKVRRDIEEIKRRVDETG

SEQ ID NO: 15582 - protein, 56 aa, Artificial Sequence
  Synthetic
ERELEKLLKEHEKTIRDIEEEHRRLLKELKDVVRESSRELEELLKEAEDVIRRVKK

SEQ ID NO: 15583 - protein, 61 aa, Artificial Sequence
  Synthetic
DEVREALKRLEDETRKNKKESDKSLERLKEESKKNKDESDKSVKNIEDKIKKLKEDLDRDG

SEQ ID NO: 15584 - protein, 59 aa, Artificial Sequence
  Synthetic
EEVKRALDELVKDHRRVLEESARRIDEIVERHRRLLDDSLRRIAELVRRVEETLREERR

SEQ ID NO: 15585 - protein, 60 aa, Artificial Sequence
  Synthetic
DEVEKALKELEDDLRELKKRSEESLKNVEEEIKRAKKELDESLDNLRKKIEELKRRLEKD

SEQ ID NO: 15586 - protein, 59 aa, Artificial Sequence
  Synthetic
EEVLRKLETIVRKIREELDRSKKKLEKLIEEAKRELERVLKEHEDLVKRVRDVLEDARR

SEQ ID NO: 15587 - protein, 61 aa, Artificial Sequence
  Synthetic
DDVRETLTRLRKETERNKRESDKSLENLKRKSEDNKRKIEESLKNMKRRIDEVKRRAEKDG

SEQ ID NO: 15588 - protein, 59 aa, Artificial Sequence
  Synthetic
EEVKKELDEILRRHKEVLRESERRLEKLLRDHRRRLEEALEEHKKLIDEAEETLKRIRD

SEQ ID NO: 15589 - protein, 61 aa, Artificial Sequence
  Synthetic
SEVEKALKELEDKTRKNKEDSERSLDKLRKDIEELRKKAERSIRNMRDKLRKLRDDVRKEG

SEQ ID NO: 15590 - protein, 59 aa, Artificial Sequence
  Synthetic
EEARRKLKELVDRHEEVLRRSLERLKRLVEEVRRTLEKILRDHERLLDELRRDLEKDRK

SEQ ID NO: 15591 - protein, 61 aa, Artificial Sequence
  Synthetic
DEVEERLRELEETTKENKRRAERSLENVRKKSRDNDKRIKESLDNIRREIKRLRDKVRKDG

SEQ ID NO: 15592 - protein, 59 aa, Artificial Sequence
  Synthetic
REVLEKLKEIVERHEEVLRRIKKKHEDLVREHRKRLEEARKRHEKLVREAEKTLDDVRR

SEQ ID NO: 15593 - protein, 59 aa, Artificial Sequence
  Synthetic
EEVERILDELRRRNEDMRRRSEENERELRKRNTELRKKVEDSLRRLREDLKRIKKLVEE

SEQ ID NO: 15594 - protein, 59 aa, Artificial Sequence
  Synthetic
EEVTKALEELVRRHRKTLEESLRKAEKVLRDHKESLERSEKKLKELMEEVKKLLDDARR

SEQ ID NO: 15595 - protein, 60 aa, Artificial Sequence
  Synthetic
SREDEIRKRLEESLERVKKIIEDIKRRIDESLERIKELLKEIDERSKRSLEKIRRKIERE

SEQ ID NO: 15596 - protein, 56 aa, Artificial Sequence
  Synthetic
EELLRRARKAHEDLLREVKRRIERAEEEHKRLLDELRKVVERSKTEIKKLLDELRK

SEQ ID NO: 15597 - protein, 63 aa, Artificial Sequence
  Synthetic
SRVEDVERKLRRKLEELKEDIERLREESRRSLEELERDSDRNRRESEDSLRRVEERIRRIKDD

SEQ ID NO: 15598 - protein, 56 aa, Artificial Sequence
  Synthetic
RETLRRVEREIERLLRELEETLKRSEEELKRIVDEHRKLLERSKRELEKLVDEVRK

SEQ ID NO: 15599 - protein, 61 aa, Artificial Sequence
  Synthetic
REIEEVLKRVEKVVRDDSRRNKEVLTRNRRKVERWKETLEDVLRRVEKAVRELRKDAEDRL

SEQ ID NO: 15600 - protein, 59 aa, Artificial Sequence
  Synthetic
EDILREVEKKLKELLDRSRELSDEVRKRSDESNKEIKKELDRARDELRRLLERIEEELN

SEQ ID NO: 15601 - protein, 61 aa, Artificial Sequence
  Synthetic
DEIEKVLEEVERVVEEDERRNRKVLEENKRLVDEWDRRVREVLKDVKRRVDELDTRARRDL

SEQ ID NO: 15602 - protein, 59 aa, Artificial Sequence
  Synthetic
KEILDRVKERLERLLEESRELSERVKREIEETNERIARELERVMETLKKLLKDIEDELK

SEQ ID NO: 15603 - protein, 61 aa, Artificial Sequence
  Synthetic
KEAEDVLKKVDTDVTRDDEDNRKLLEDNRRSVEEDERRNRRVLEEVEKRVRDLAERVKRDL

SEQ ID NO: 15604 - protein, 59 aa, Artificial Sequence
  Synthetic
REILKRVTEELERLLAESERLSEEAEERVRRSDDTSRRLSEEVRKELEELLRRIEERLR

SEQ ID NO: 15605 - protein, 61 aa, Artificial Sequence
  Synthetic
REVEEVLKRVKETVEKDREDNTRVLERNRESVKEDDDRNRKVLKRVRDEVRKLLEEAKRDL

SEQ ID NO: 15606 - protein, 59 aa, Artificial Sequence
  Synthetic
EEILKRIEEELKRLLEESRELSKEVEDRVRKSDKKSRDLSEKVKKDLKELTDEIRKRLK

SEQ ID NO: 15607 - protein, 61 aa, Artificial Sequence
  Synthetic
SEIEDILERVREEVDKDRRKNDEVLRENERLVKKDDDDNAKADEDVRRKVTELEKRARREL

SEQ ID NO: 15608 - protein, 59 aa, Artificial Sequence
  Synthetic
EEILKRVAKRLKELLEESKRLSDEVTKRSRDTDEESERLSRKVDKEVKDLLKEIERELE

SEQ ID NO: 15609 - protein, 61 aa, Artificial Sequence
  Synthetic
SEVEEMEERLRKLDEDSRRLSEDVKRRLDKINKEIKDLLDDVRRKLKEMLDKLTKDLRDLK

SEQ ID NO: 15610 - protein, 62 aa, Artificial Sequence
  Synthetic
KRAEDKVRDVLRDNERTLKKDEDDNKRVLDEDEKRLREWEERARRVLEEVRRRLKELVEEVR

SEQ ID NO: 15611 - protein, 61 aa, Artificial Sequence
  Synthetic
REVDKAREDLRRVDDELRKILERVRRELEKLDKESEERSRRLARDLDRLLEELERDLKDNK

SEQ ID NO: 15612 - protein, 62 aa, Artificial Sequence
  Synthetic
REVERKVREVLKDNERTLRELRDTIRKVLEDNDKTLREDVRRNEEVLRRVDETLRELKKRVE

SEQ ID NO: 15613 - protein, 60 aa, Artificial Sequence
  Synthetic
SEVDKVKEDLDEVDKDSRRISREMEERLKELDKRSREISDRVVRELEKILKEIEDLLRDL

SEQ ID NO: 15614 - protein, 62 aa, Artificial Sequence
  Synthetic
KEARDKIRRVLEDNERTLREDIEDNRKVLEDNDKRLKDDERKNREVLKRVDETLKELDERVK

SEQ ID NO: 15615 - protein, 61 aa, Artificial Sequence
  Synthetic
DELRELEERLRRSVEEIKRDLKRIHDENREAVERSERKSKKILEELKREVEDVKRELREKL

SEQ ID NO: 15616 - protein, 59 aa, Artificial Sequence
  Synthetic
EKLVREIERRVRKMEEDVRELVKTIEKRSRDVIKKSEDILKRIKERVEELEKRVRDAVR

SEQ ID NO: 15617 - protein, 61 aa, Artificial Sequence
  Synthetic
DELRELLETLRDEVRKDDKRNEDIHRENRKRVEESRRRSEKILRDLREVVKRLEDELRKKL

SEQ ID NO: 15618 - protein, 59 aa, Artificial Sequence
  Synthetic
EELLKRIEKRVRDMIRRSRTLSARLEDLSRELDERSKRVVEDLKRRIDEAIKELEKEVE

SEQ ID NO: 15619 - protein, 59 aa, Artificial Sequence
  Synthetic
DETEEVAKKIKELIERSRELVKKVKEKIDRLNEEIEKLVREVEKTIKELTDRIEELRKR

SEQ ID NO: 15620 - protein, 58 aa, Artificial Sequence
  Synthetic
EEMKKLLDDLRKAVDESRRRSEEILKENRKRVEKWREDLRRLLEKVKEDLDRIRERLR

SEQ ID NO: 15621 - protein, 59 aa, Artificial Sequence
  Synthetic
SEVEEAKKTLDELNRDIAKKVEDVEREIKRMIEESERLTREVEERIRRLTKKIEDLRRG

SEQ ID NO: 15622 - protein, 58 aa, Artificial Sequence
  Synthetic
ERVKKILEENKRDAERWKRRLKKLLDDVRRLVKEDDDRNEELLREVTERVRRIEEKLD

SEQ ID NO: 15623 - protein, 59 aa, Artificial Sequence
  Synthetic
SEVEKVKEELKKLNKEIADSSDEVDKDIERLIRESRKLTEDVRREIKRLIERIDELRRA

SEQ ID NO: 15624 - protein, 58 aa, Artificial Sequence
  Synthetic
EEAKRILDENKKLVREWEEKSRAVLEKVKKLVKRDDDENKKLLDDVKKLVDEMRERAR

SEQ ID NO: 15625 - protein, 60 aa, Artificial Sequence
  Synthetic
DLEREIRKIIEEAKKELERVNDEIRRIIEEMRRRSEESNKRIREIIERARRRLEELIRRG

SEQ ID NO: 15626 - protein, 58 aa, Artificial Sequence
  Synthetic
EEVKKLLTDLKRLVDEIRKHNKRLLDELRKEVEKSERENRRLLEEVRRTVDEMRERAR

SEQ ID NO: 15627 - protein, 60 aa, Artificial Sequence
  Synthetic
SAEDKARKIAEDAKKEAEDSNRDAHRIAEEAKRRARKINEEARELIERAKKELTRLRREG

SEQ ID NO: 15628 - protein, 58 aa, Artificial Sequence
  Synthetic
EEAKKLLDELRKAAEDIRRNNEEALKDLRRAAEEIRRHNEELLRRAREAAKKARDDAE

SEQ ID NO: 15629 - protein, 60 aa, Artificial Sequence
  Synthetic
SAEEAVKRVEELVRRVKERNKRLVEDVEREVRRVKKRSEETNRRVKKLVERVKEDLDKRV

SEQ ID NO: 15630 - protein, 59 aa, Artificial Sequence
  Synthetic
KDKLEEVLREVRDRLADVERKSERVVEEVERLLREVVRKNEDVLRRIEELLRDVEEKAR

SEQ ID NO: 15631 - protein, 60 aa, Artificial Sequence
  Synthetic
SVEELVREVEKRARKVKRDSDKTNKDSTKLVKEVKDRSRRTNEEVKKEVERVKEDLEKRV

SEQ ID NO: 15632 - protein, 59 aa, Artificial Sequence
  Synthetic
EDKLKEVVDRIRKLLEDVKRENEDVKRRSRELAERVREENDKVSKEIRELLEEVERRAK

SEQ ID NO: 15633 - protein, 60 aa, Artificial Sequence
  Synthetic
SAEEMREEVKRLVDKNRKDNREVEKKSTRLAEDVKRKSEETNRKIREEVERVKKDLEERV

SEQ ID NO: 15634 - protein, 59 aa, Artificial Sequence
  Synthetic
EEKLKEVLDEVRRLIKEINDHSREVSKTSEKLLRDVLKKNEDVLREIERLLEEVRRRIK

SEQ ID NO: 15635 - protein, 60 aa, Artificial Sequence
  Synthetic
REVEEITKEIREMNEESKRLLEEVREKIERLSRESNRLLEDSKREIDEAIRRVEELLDKE

SEQ ID NO: 15636 - protein, 56 aa, Artificial Sequence
  Synthetic
KDIITEIERTNDETEERVRDIERRIKESSDRNDKRAKEISERIKRLLEEVDKKVKE

SEQ ID NO: 15637 - protein, 60 aa, Artificial Sequence
  Synthetic
DLEELVKEVERRVRRNKTETDRLVEEVERSVRENRRRIEELVRRVEKEVRRIKEDLKRKL

SEQ ID NO: 15638 - protein, 59 aa, Artificial Sequence
  Synthetic
KDVLEKVAREIKRLIEESNRLDKEVEDEVREMSKDVNRELERIAEEIEKVLRDVERKLR

SEQ ID NO: 15639 - protein, 57 aa, Artificial Sequence
  Synthetic
SLEELLKEVKKLVEDVHRKNKKNVEDVRRLVERLRKENEENVEEVRREVKKVKEEIG

SEQ ID NO: 15640 - protein, 56 aa, Artificial Sequence
  Synthetic
LEEVRRRVEELVTDVDRSSKENHRRIRKVVREVERTTEENHRRIRDIVRRVREEAK

SEQ ID NO: 15641 - protein, 56 aa, Artificial Sequence
  Synthetic
SEIEKAVRELEELVKDNERKSKKSVEDSERIVKEIRDRVRRVVERVRKVVEDIARA

SEQ ID NO: 15642 - protein, 59 aa, Artificial Sequence
  Synthetic
DDELRKVVERARDLIRKIREESKRSHDRITKLAEDIKRELEKIERRLEKLAEELERKAR

SEQ ID NO: 15643 - protein, 56 aa, Artificial Sequence
  Synthetic
SEVDELRKEVEEMVKRNKDETDKSVKESKEIVDEIRKRIKEVVDEVRRFVEDIRRE

SEQ ID NO: 15644 - protein, 59 aa, Artificial Sequence
  Synthetic
SRALEDVARRLRELLKRINDKTRESHKEIKRLADEIRKKLEDIVRELEKLLREIKERAR

SEQ ID NO: 15645 - protein, 56 aa, Artificial Sequence
  Synthetic
SEVDEVRERLERVVRRIEREVEKSERDSERIVEKNKRDTDRVDREIEKVVKKIRDR

SEQ ID NO: 15646 - protein, 59 aa, Artificial Sequence
  Synthetic
SRALEEIEKRARELLKRITELLRESHERIKRLAEEINKKTEKVVRDIRKLLKEIEDKVT

SEQ ID NO: 15647 - protein, 57 aa, Artificial Sequence
  Synthetic
SEIERLREELERVVRAIERTVTESVRESKEMVDRNKRATEKSVRDSEDMVREIEERG

SEQ ID NO: 15648 - protein, 59 aa, Artificial Sequence
  Synthetic
SRELERVAKEARDLLREIKKLLDESTETIRRLVKEINDETERSHRKITELAKRLKEEAK

SEQ ID NO: 15649 - protein, 56 aa, Artificial Sequence
  Synthetic
DEVRELVEEVERVVKRNKDESKKSEEESREIVREIEKRVEDLVRTVEEVVKEIERK

SEQ ID NO: 15650 - protein, 59 aa, Artificial Sequence
  Synthetic
SRELEKVADTLRKLLKEINEKLERSVRRIRELAKEIKDELRRIEEELRKLAKELDDEAK

SEQ ID NO: 15651 - protein, 59 aa, Artificial Sequence
  Synthetic
DRTREVMERIERLLEDSRRKTDKVRREIRKLLEDVHDKTRRVAKEIRDLLDEIRRLLES

SEQ ID NO: 15652 - protein, 55 aa, Artificial Sequence
  Synthetic
EEVVKKARKKVRENAEEAEEVRRRIRRSVEENRKELRRLEKELKDVLDEIRERVR

SEQ ID NO: 15653 - protein, 59 aa, Artificial Sequence
  Synthetic
RELEEVRKDIERLLKEVEDTNRRAKERVKRLLEEVHDDTRRAVERIRKLLDEIRKLLEG

SEQ ID NO: 15654 - protein, 55 aa, Artificial Sequence
  Synthetic
EEVVKEIEKMLEKIARHARKSDKEAKESVEDNRRRLEKVRKEVEDMLDEIRERAR

SEQ ID NO: 15655 - protein, 59 aa, Artificial Sequence
  Synthetic
DREKEVADRIRKLLEEIREESERVAKEIRELIKEVHKRTKEVAEEIRRLLKEVEELLRN

SEQ ID NO: 15656 - protein, 55 aa, Artificial Sequence
  Synthetic
EEVVKEIERRLRENERKLRELEKEIKKLVEDNRTRLRELEDEIRRVLKKITDEVT

SEQ ID NO: 15657 - protein, 57 aa, Artificial Sequence
  Synthetic
SELEKAVEDSRRLDRRVEETLRDVTRRVRETNKEVEDMLEEVRERAERLLREIEEKL

SEQ ID NO: 15658 - protein, 59 aa, Artificial Sequence
  Synthetic
EDELRKVIDENRKSVETIEEELRRVEKEDEDTLREIEEKLRKAIEELEKKLKEILDRLR

SEQ ID NO: 15659 - protein, 59 aa, Artificial Sequence
  Synthetic
REREELVERVRELLKEVEDRDREMVERSERLNERIRERDKEVEDRSRKLDEDIERLLRA

SEQ ID NO: 15660 - protein, 55 aa, Artificial Sequence
  Synthetic
EEVLKEVKDAVDTLKKHSEDVIRKDEESVRDLRRHSEDVLRKNKEMVDDIKAKAE

SEQ ID NO: 15661 - protein, 63 aa, Artificial Sequence
  Synthetic
DEEDKLREVLKDVERRVREMLRENNELIREVAETSERLLRENNELIERVRKEVTRLLKELEKV

SEQ ID NO: 15662 - protein, 55 aa, Artificial Sequence
  Synthetic
REIVETIRKILREIEEHAERNKTRLEEENKKVREHVERNKKDLEETLKEVEDRAR

SEQ ID NO: 15663 - protein, 63 aa, Artificial Sequence
  Synthetic
SKEDKLREELKEVEKTVRELLKRNNELIERVREEVERRLEENNRLIKEVKDRIDDLLRKLKDD

SEQ ID NO: 15664 - protein, 55 aa, Artificial Sequence
  Synthetic
REIVKTIKEILDEIRRHLERNKDRLEKELTRVRETAEKNKRDLEKVLEDVDRKAK

SEQ ID NO: 15665 - protein, 60 aa, Artificial Sequence
  Synthetic
DEAEKLEREVRKELEENREELERSTEESERLLKHNEDELRKSEEESKKLLREVEKELRRV

SEQ ID NO: 15666 - protein, 59 aa, Artificial Sequence
  Synthetic
KRVLDEVVKEIRRLIEEVKRTTKEMNKKIRKLFEESNRKLEEAHRDIRRKAERVKRELK

SEQ ID NO: 15667 - protein, 60 aa, Artificial Sequence
  Synthetic
KELDEIREEVDRVLRENERRLRTVKKEARDVLEHNRKRLEELRRKIEEVLKEIEEELKRV

SEQ ID NO: 15668 - protein, 59 aa, Artificial Sequence
  Synthetic
EEVLRRVLERIRRLIERVKERTKRMTDDMRRLIEESNDKLRRAEERIRKLLEEVKRTLK

SEQ ID NO: 15669 - protein, 60 aa, Artificial Sequence
  Synthetic
KKVEDIKREAEKVIKESEESIRRNERELDEVIKESERSIRRNERELERVLKELRDSVARL

SEQ ID NO: 15670 - protein, 55 aa, Artificial Sequence
  Synthetic
DRIREELKKVADEIRETNKRIHEESKRVVDEVRRTNEEIHKRSAKVVKDIKDKIK

SEQ ID NO: 15671 - protein, 60 aa, Artificial Sequence
  Synthetic
EEVERITEDAKRVIDESRKTIKRNEDDLRRVIEESRETVERNRKRLEEVLRELEERVRRL

SEQ ID NO: 15672 - protein, 55 aa, Artificial Sequence
  Synthetic
KRIEEELKRVAEEVKKINEDIHRRSKEEVDRVREINEKIHRDSERVAEEVRRRIK

SEQ ID NO: 15673 - protein, 57 aa, Artificial Sequence
  Synthetic
EELERLKEEVEEIVRRLKRELERIEEEIAKMVRDSEKSLEEDEREVRKVVEELRRRG

SEQ ID NO: 15674 - protein, 59 aa, Artificial Sequence
  Synthetic
EEILRRVKEEVEKVARDIKAIIEKVAREVKEVLDRIREVNKRAHEETRKVADEIEKRAK

SEQ ID NO: 15675 - protein, 56 aa, Artificial Sequence
  Synthetic
DEVERIAKELTDVLDRIRKAVETDKEEIKRVLKEIEEAVRTNEEKLKDALRKIREG

SEQ ID NO: 15676 - protein, 59 aa, Artificial Sequence
  Synthetic
ERALERVEEKARELVRRVDELLRRSHERTKELAERVRRLLKKSDEETERLARDVERKIK

SEQ ID NO: 15677 - protein, 56 aa, Artificial Sequence
  Synthetic
SEVERITERLKEVLKEIKELVETNSEKLKRVLEEIKKAVEDNTRTIKKVLEEITRA

SEQ ID NO: 15678 - protein, 59 aa, Artificial Sequence
  Synthetic
EEMLKRVEDEARRLTERVRKLIEDSDRETEKLVRRVRELVKRSHEKVKELVDRVRKRIE

SEQ ID NO: 15679 - protein, 56 aa, Artificial Sequence
  Synthetic
SEVERIAEEVKRVLEKIRRDVEENRKRIEEALKRIEKELRDNERRLREVLDEIRKR

SEQ ID NO: 15680 - protein, 59 aa, Artificial Sequence
  Synthetic
EDALRAVEEEIRKLEDEVRRLIETSHKEVEDLAKEVTDLLRESNERTEDLRREVDAKRR

SEQ ID NO: 15681 - protein, 64 aa, Artificial Sequence
  Synthetic
SDEERLLRTITRVLEENKKSVDDDLKKNEDVLDENRRRVERWEEALRELLKRVEDKVKDLKKDG

SEQ ID NO: 15682 - protein, 56 aa, Artificial Sequence
  Synthetic
TDEIRRVLEKVKEELDRTDEKSRDLSRKVRDRIRESNREIEKLLEEVRERLERETK

SEQ ID NO: 15683 - protein, 64 aa, Artificial Sequence
  Synthetic
READELRTRAEKALRDNRESVERLKRELDRVLKENERTVRELKERVKEVLKDVDKKVKDLKKEG

SEQ ID NO: 15684 - protein, 56 aa, Artificial Sequence
  Synthetic
REEIRKVLEDVRREVEETDDRIRKVLERARRESEKVDRELKKELERVRKELEEETK

SEQ ID NO: 15685 - protein, 59 aa, Artificial Sequence
  Synthetic
DRERRVLEELRKLSEDSKRLLERIRERMRRLAEETKRRARDILREVEELSRRVKELLDG

SEQ ID NO: 15686 - protein, 55 aa, Artificial Sequence
  Synthetic
EEVKDDVRRSSEEVKEEVERLIREAKKSTDEVRELLKELEKRLRESIEESKRKAE

SEQ ID NO: 15687 - protein, 57 aa, Artificial Sequence
  Synthetic
EEVKRMEDRLEEVAKRADEESKKVMDELEKIVRDVLRESKRLTEELRRIADRVRKEL

SEQ ID NO: 15688 - protein, 59 aa, Artificial Sequence
  Synthetic
KKELDRIEKRVREIKKRSEDSVRTIRERVRDAKRKLERSVEEDKREVKEIKERLEREAR

SEQ ID NO: 15689 - protein, 57 aa, Artificial Sequence
  Synthetic
SEVDDLKRKLDEVVRRAKEESKEISERLEEIVRDAERLLKELHEEDERIVDRARKEI

SEQ ID NO: 15690 - protein, 59 aa, Artificial Sequence
  Synthetic
RDKLEKIRDAVRKVKEELERSLEKDRKRVTEIEEKLKKLVEENRRTSKRVKEELEEKVR

SEQ ID NO: 15691 - protein, 60 aa, Artificial Sequence
  Synthetic
RELEEIKKRVEDIMRRIEDLLRENEKKIDKVRKDIRKSLEENKRKVEEVRKDLKRLLDER

SEQ ID NO: 15692 - protein, 55 aa, Artificial Sequence
  Synthetic
EEVKKEIERLAKKLEEELERSNRESDRLVREARKHNEESDRRSEELARRVRERLR

SEQ ID NO: 15693 - protein, 60 aa, Artificial Sequence
  Synthetic
KREEDVKRDLKRVADESRKSDEDIKRRLDRLVKEIRELHKKTTDELKKVADEVRDRLRKV

SEQ ID NO: 15694 - protein, 55 aa, Artificial Sequence
  Synthetic
DELREDVKRVEDENRTSLREIKRAIEKVLDESRKLVEENRRRAEKIIKEVEDTLR

SEQ ID NO: 15695 - protein, 60 aa, Artificial Sequence
  Synthetic
REEEEVTEELKRLADKSRKSDEDIERTDRRVTEEIERLHEETTRELEKVRRDVDRELKKV

SEQ ID NO: 15696 - protein, 55 aa, Artificial Sequence
  Synthetic
DELKKEVRKILEENKRSLERIRRHSTRVEEKSRKLIKENDDRLKKVIEDVRRKLK

SEQ ID NO: 15697 - protein, 60 aa, Artificial Sequence
  Synthetic
SEKDKVTKELEDVARESRESDKEIKRELDEVVEESERLLREIRRRLEKVAEEVRRALEKV

SEQ ID NO: 15698 - protein, 55 aa, Artificial Sequence
  Synthetic
EELKRRVEEIIRENEESVRRIAKRADDSNREIERLVDEIRRRAEEAIRRVTEKVR

SEQ ID NO: 15699 - protein, 60 aa, Artificial Sequence
  Synthetic
KEEDDVRRKLEKVVREIDKLHKESTERDRKVREDSEETDRRIKEELKKVVKEVRDRLREV

SEQ ID NO: 15700 - protein, 55 aa, Artificial Sequence
  Synthetic
EELKDEVRKATEKSEDLVRRNEEHSRRVIEENERTLKDIADEAERVIKEVEDRLR

SEQ ID NO: 15701 - protein, 60 aa, Artificial Sequence
  Synthetic
REDEEVTKELEEVIREIEELHERSTRKLKEVVDRSRELLDRVRRRLKEVVDRIRELLERV

SEQ ID NO: 15702 - protein, 55 aa, Artificial Sequence
  Synthetic
EELRKRVEEAIRKSEELVKENTERAKKSNEELERRVRELEERAKRAIEEVKEKIR

SEQ ID NO: 15703 - protein, 60 aa, Artificial Sequence
  Synthetic
SREEDVDRKLDEVIERSRRIDEEILRRDKEVVDEIRKLHKESTDRLKEVVDRVDKELKEV

SEQ ID NO: 15704 - protein, 55 aa, Artificial Sequence
  Synthetic
EELKKKVTEAIEENRESVEEIRRHSEEVKKESEKRVKENRDRARRAEERVEEMLR

SEQ ID NO: 15705 - protein, 60 aa, Artificial Sequence
  Synthetic
DREREVKKRLDEVRERIERLLRRVEEESRRVAEEIRRLIEEVRRRNKKVTEEIRELLKRL

SEQ ID NO: 15706 - protein, 55 aa, Artificial Sequence
  Synthetic
KELREELKKLERKIEKVAKEIHDHDKEVTERLEDLLRRITEHARKSDREIEETAR

SEQ ID NO: 15707 - protein, 60 aa, Artificial Sequence
  Synthetic
DEEEKITRDLEKVEDEIRRLLEEVRRLSKKVKEEITKLLEDVNRESEKAVRKVRETLKRL

SEQ ID NO: 15708 - protein, 55 aa, Artificial Sequence
  Synthetic
ERLRKRVTDVIRKLEEVLKDIHRHDKEAIEEAERRLEDNHRRNRRVLEELKRRAD

SEQ ID NO: 15709 - protein, 60 aa, Artificial Sequence
  Synthetic
SEEETVEELVRRAEEKSRRILEDSKKKVRDIERENDEILKRSRDRVKKAEDDLRRVVEKR

SEQ ID NO: 15710 - protein, 55 aa, Artificial Sequence
  Synthetic
ERILRELERVVEEIDREHERTKEELKKVADESRKAHRESERDLERVIREVRERLR

SEQ ID NO: 15711 - protein, 60 aa, Artificial Sequence
  Synthetic
SEVERVRKTVEEIKEKNERILKTSKDEVRRILEESERMLEESKKRVDEVREEAADVVRKR

SEQ ID NO: 15712 - protein, 55 aa, Artificial Sequence
  Synthetic
DRILEKLEEAAKRSDELHKRSRDDLRRVAEEIKKLHEETRRKLKKVVDEIRKKLK

SEQ ID NO: 15713 - protein, 61 aa, Artificial Sequence
  Synthetic
STLEEVRERVDRVKKKLKKLLEEVTEINERSKKEIDEILKESEDRVRKVKEDLKRVVKEDK

SEQ ID NO: 15714 - protein, 59 aa, Artificial Sequence
  Synthetic
EEVLERVLRELEELTRRVEKEIRDLLKRIEDSSRRVRELATESRKKLEDLVREIKERLT

SEQ ID NO: 15715 - protein, 59 aa, Artificial Sequence
  Synthetic
SSEEKVREEVERVREEITRLLRENEDTVRRVDEKAEKALRENKERVDRLREEVRKLLEK

SEQ ID NO: 15716 - protein, 59 aa, Artificial Sequence
  Synthetic
DDFVRKVTEELKKVTDRIRKLLEESRKHTERVRREAEKLLKEIKDETKKVEEEVRRRAK

SEQ ID NO: 15717 - protein, 59 aa, Artificial Sequence
  Synthetic
SSREKIKDDLRKAVEENRRLLREVRELLREMLERDERILREIERRLDEARKRLEEVARN

SEQ ID NO: 15718 - protein, 58 aa, Artificial Sequence
  Synthetic
RAVEELKKELRRLEEESRRAVEDLKRLLDELKERTDRVVKKLDETLRKLKEDVDRKAK

SEQ ID NO: 15719 - protein, 60 aa, Artificial Sequence
  Synthetic
REIDELRKELDEIRKRIEKVIEELKRHLDEVDKRAEDLAKELDDLTKTIERDAERRIRED

SEQ ID NO: 15720 - protein, 59 aa, Artificial Sequence
  Synthetic
DKVIREVEERVKRIKEDVDRVLEDNSREVERVKRKVDKMLKRNKDEADRIRKKMDDDLR

SEQ ID NO: 15721 - protein, 60 aa, Artificial Sequence
  Synthetic
SVIERLKEELKKIEEDARDMAKKLNKETEDILRRARKLARELEKHLEDVKRKIDELIKED

SEQ ID NO: 15722 - protein, 59 aa, Artificial Sequence
  Synthetic
KKMIEEVERDVRRIKKEVDRLLEENTERIEEIKKEVDELLKRNTDEVEKVKKKVDEDRK

SEQ ID NO: 15723 - protein, 59 aa, Artificial Sequence
  Synthetic
KIEEDLERSLKKSEDELKELRDRLRKSNKEVTDDAERIKKEVEDSNREVEKRVRDLERR

SEQ ID NO: 15724 - protein, 59 aa, Artificial Sequence
  Synthetic
SEEARKVLEENEEVVRRIVKKVEDILDDHRRVVKEVRDRIERLLKEHKKIVEDADKDLT

SEQ ID NO: 15725 - protein, 60 aa, Artificial Sequence
  Synthetic
REEEEVAKKLERAAEESRRLHEESKRDHERATDEIRRKAEATLRELKRVIDEIERLADER

SEQ ID NO: 15726 - protein, 55 aa, Artificial Sequence
  Synthetic
EEIRRRVETLERENRKAEEESRDKVRKSERRLEELNKRHEDLVRELEERLERKRK

SEQ ID NO: 15727 - protein, 60 aa, Artificial Sequence
  Synthetic
DEEEKVLRELEEVIRTSRRLHKRSLEELDRVLEESKALHRESKRALEDVTREITKLADDR

SEQ ID NO: 15728 - protein, 55 aa, Artificial Sequence
  Synthetic
ERIRKLVDDLRKENEKALRESKKRVEEIRRRNEEAIKDSKKDVEDLERDLERKRK

SEQ ID NO: 15729 - protein, 60 aa, Artificial Sequence
  Synthetic
SDEERVLEELKKVIKESRDLHKESLDDLRRVIEKSRRLHEESLERLRRAIEEIERLMDER

SEQ ID NO: 15730 - protein, 55 aa, Artificial Sequence
  Synthetic
EEIRDLVRTLEEDNKRMEERSRRTVRKLEKENDDARKESERLVEELERRLEEKRR

SEQ ID NO: 15731 - protein, 60 aa, Artificial Sequence
  Synthetic
RDVEEVKKRSDTTLKRIEELIRRVNERSKKSIKEIRDRAKEVEDEVRELARKIEEDARRR

SEQ ID NO: 15732 - protein, 59 aa, Artificial Sequence
  Synthetic
DEVVRELEKINDKSRKRVEDAVRSNEKLLEDSERDIRRVIERLKKLLEDLKRKLEEIER

SEQ ID NO: 15733 - protein, 60 aa, Artificial Sequence
  Synthetic
SDAERVMEESRRTIEKIKKDAKEMNERSRKTVDEIRERLERLLRELERIAEEIRRELEKR

SEQ ID NO: 15734 - protein, 59 aa, Artificial Sequence
  Synthetic
EEFVRELKKLNDKSRKDVEDLKRSNEEINEDSKRKVEEIIRRLEELLKEIRRELEDVER

SEQ ID NO: 15735 - protein, 60 aa, Artificial Sequence
  Synthetic
SVEEDLKRLVDEIRRRVEKVKRDLERIVDENRKRVEESKEESKKSVEEIERRVREAAKRI

SEQ ID NO: 15736 - protein, 59 aa, Artificial Sequence
  Synthetic
EKVADEVRKRLRKMIRDLEEVAREVKRELERLHEETERSSRDAKRRSDKMARDLERTEK

SEQ ID NO: 15737 - protein, 60 aa, Artificial Sequence
  Synthetic
SSEEKLRELVKRIKRRVEEIIRRLEESVERDRDEVRRSKERLEALVEEIRRRVDDIEKRI

SEQ ID NO: 15738 - protein, 59 aa, Artificial Sequence
  Synthetic
EKAVREVEEELRDMERKLEKVAEEVTRRSKEVTEKLRESSDRVEKELRRIIEELERVAK

SEQ ID NO: 15739 - protein, 60 aa, Artificial Sequence
  Synthetic
SVREDLKRLVKEIEDEVRKSKKDLDDSVREDKREVRESKEDSKRSVKRSEEEVRKIKKRT

SEQ ID NO: 15740 - protein, 59 aa, Artificial Sequence
  Synthetic
EEVAKRVRELLEEIMRRLRKTSEEARRRSKKITDDLRESSKKVREDSERLRKRLEEEAK

SEQ ID NO: 15741 - protein, 60 aa, Artificial Sequence
  Synthetic
DAERKITRLLEEIRRESKRSSEEIKKSLKENEDEVRRVVEEIRKRLREIEKEVKEVLDRL

SEQ ID NO: 15742 - protein, 59 aa, Artificial Sequence
  Synthetic
EKLVEEVLREVKRIIEENRTLSERVKEHNEKSHRESEELAKRVKELLKEIERDIRRLEK

SEQ ID NO: 15743 - protein, 55 aa, Artificial Sequence
  Synthetic
SDAERVLKESKESLEELERRVTEALKRSRDSLRRLKEVADEARRRLEEVLERIAR

SEQ ID NO: 15744 - protein, 59 aa, Artificial Sequence
  Synthetic
SEVKERLKRSLEETEKRVREVEERLKKTVEDTRKVVEDIERELERLLREVEEVVRRIEK

SEQ ID NO: 15745 - protein, 55 aa, Artificial Sequence
  Synthetic
EEAERMLRESEASLRRIEKIVREALEASRRTVEELKKVVERVLREVRKLIEEIEK

SEQ ID NO: 15746 - protein, 59 aa, Artificial Sequence
  Synthetic
DEVRERLKKTVEDSKRVVEKAEEDLRRSLEDTERLVREASRRLRDLLRELRRIVEEIKR

SEQ ID NO: 15747 - protein, 55 aa, Artificial Sequence
  Synthetic
SEDEKALRESKKTTDEIRKRVTEMEKRSREVVKEIRDIIERVLREVRRVLEEIRK

SEQ ID NO: 15748 - protein, 59 aa, Artificial Sequence
  Synthetic
SEAKKRLKDSLDRTRKTVEEMTRRLEKTVKETEDLLREARERLEELLRELERVADEKRR

SEQ ID NO: 15749 - protein, 55 aa, Artificial Sequence
  Synthetic
SEDEKVLRDSRKVLREIEEVVKEVLKRSKKLVEELEDIARRVLKESEDSNKEARD

SEQ ID NO: 15750 - protein, 59 aa, Artificial Sequence
  Synthetic
DEVERRLRKTVRDTKEVVDRAREKLERTVRTTEETVKEIEKRLEESLRRSREDVKEREK

SEQ ID NO: 15751 - protein, 60 aa, Artificial Sequence
  Synthetic
RVEDALRKLLDDVRRLVEEAERRLRTSNDKSRRLVEEAKRRLEESNERSEKLVRDVRRRI

SEQ ID NO: 15752 - protein, 59 aa, Artificial Sequence
  Synthetic
SKVVEEVLKELEELIKTAKKIIEDVLRASEDTIRRLEEIIRKVEEDSKRIIEEIERAAR

SEQ ID NO: 15753 - protein, 60 aa, Artificial Sequence
  Synthetic
SAEDKLRKLLDDARRTVKEVEERLKKLNKKLEEDVKRVKRELRESNKKSRELVEKVKREV

SEQ ID NO: 15754 - protein, 59 aa, Artificial Sequence
  Synthetic
SEVVEEVLEELKKLIETVKRRAKEVLDRSEETIREIRKRAEDVLRESERIIEDIERMTR

SEQ ID NO: 15755 - protein, 60 aa, Artificial Sequence
  Synthetic
KVEKRLTDLLKTVADEVKRVEDELRETVRESKEVVDKSRRDLERTVEESEKTVKDAERRV

SEQ ID NO: 15756 - protein, 59 aa, Artificial Sequence
  Synthetic
EEVVKKVEKEIRELLERLKEEADRVRERSKKILTDLKKSSEDVKRESERMLKKLEDEIR

SEQ ID NO: 15757 - protein, 60 aa, Artificial Sequence
  Synthetic
SVEERLEDLLREVTETLDTSRRRLEKLDREVDKKVKEVEKRLRETLKESEDTVRDVERRV

SEQ ID NO: 15758 - protein, 59 aa, Artificial Sequence
  Synthetic
EEVARRVEKELEDILRKLRKSSEEAERRIEEMLRRLDKVVKEMLKRSRDLLRTLEETTK

SEQ ID NO: 15759 - protein, 60 aa, Artificial Sequence
  Synthetic
SIREDVERLAEELDRKSREIATRAKRELDEILRKDKEISDRARKELEEILKKLKEIADRD

SEQ ID NO: 15760 - protein, 59 aa, Artificial Sequence
  Synthetic
KEVEKRLDDALKRNAEEVEDVKRKLKDVLREVERTVRESEKDLRRVLEEVERAVREIRR

SEQ ID NO: 15761 - protein, 55 aa, Artificial Sequence
  Synthetic
SEVDEVLKRSRDVLKRIDEIVKKVLTDSKRVLEDLRRIVKEVLDESKKVLEEIRK

SEQ ID NO: 15762 - protein, 60 aa, Artificial Sequence
  Synthetic
AEEVERAMRKSSDDLRRKLEEVERRLRKSSEESKKVLKDAEREIRRSSDELRKVLEDIRR

SEQ ID NO: 15763 - protein, 55 aa, Artificial Sequence
  Synthetic
SEVEDVLTKSRKVLKEIEEIARKVLEESKRVLEEIRRVVEEMERRSEDVLRELRR

SEQ ID NO: 15764 - protein, 60 aa, Artificial Sequence
  Synthetic
ADEVRDEVRKSSEELRRVLEEAEERIRRSSKESKELLKRVKERIEELSRRLEKVLREIEK

SEQ ID NO: 15765 - protein, 59 aa, Artificial Sequence
  Synthetic
DAEDELKKAEDRLRKSDEEAKKSIEDVKRELRRLLEESKKEIEKLIEELRRLLERAKEK

SEQ ID NO: 15766 - protein, 59 aa, Artificial Sequence
  Synthetic
EEVVERVLRKVERLLEENERLVKEVEDELRKLLEDLKRSSKKVRDEVKELAKRLRDEVR

SEQ ID NO: 15767 - protein, 59 aa, Artificial Sequence
  Synthetic
SAEERIEEVKERLRRSDEEAKRKIDRLVEELRRLLEESKKEAEKVKKELRKLLEEVKRK

SEQ ID NO: 15768 - protein, 59 aa, Artificial Sequence
  Synthetic
EEVVKRVEDELRRLLEENKKLVDDILDEVRRLLEELEKSSRKVKEDLDRLLEELRREDK

SEQ ID NO: 15769 - protein, 59 aa, Artificial Sequence
  Synthetic
SAAEEVKKRITDLLRKDEEVVKRASEAVERLLEDDKRVVEDVRREIEEILRTLEKVTRE

SEQ ID NO: 15770 - protein, 56 aa, Artificial Sequence
  Synthetic
KDDVKRAEDEVRKSHKKVEDDLRRLKEEVERSLKDTEDKARRAKEEVERLLRESER

SEQ ID NO: 15771 - protein, 59 aa, Artificial Sequence
  Synthetic
DEDDRVRKEVEKMLRDDDRIVKEIEKRLKDLLDRDRKVVREVRELVEELLRRLEKVIKD

SEQ ID NO: 15772 - protein, 56 aa, Artificial Sequence
  Synthetic
EEDVDRLRREVDKSNKDTKKILDEVRKEVEDSLRKTKKIIDDALRRVDELLKEAER

SEQ ID NO: 15773 - protein, 56 aa, Artificial Sequence
  Synthetic
SVEERVEDIKRSNEESNKRLREEVEKIKEELKEINKRVEDTVREIEKRLEELLRRV

SEQ ID NO: 15774 - protein, 59 aa, Artificial Sequence
  Synthetic
ERVVEEIDKIAKEVNTRNKKVVDEIRKRAEEVKEESKESLKRLRKIAEEVLEELKKRAT

SEQ ID NO: 15775 - protein, 56 aa, Artificial Sequence
  Synthetic
DLAEEVRKDVEDLERTNEKVVRDIRKLLEDLNREHKRVSDEIRKRIEELKEKLKRI

SEQ ID NO: 15776 - protein, 56 aa, Artificial Sequence
  Synthetic
DDDVRRIKKRAEDSHDRVKKELDRIAKSNEELLRKTEEEVRRLLEELEEILRRTRK

SEQ ID NO: 15777 - protein, 59 aa, Artificial Sequence
  Synthetic
DEVEEALRRVEESNRRVKEEVERAVERVKRSDDDVRRLVEEMEREVRKLIDDIRRLAEA

SEQ ID NO: 15778 - protein, 56 aa, Artificial Sequence
  Synthetic
KDEITELKKHSERLLEEAERLVRDLKRHSDELLEEVEERLRRLREDLKRLLDEVET

SEQ ID NO: 15779 - protein, 59 aa, Artificial Sequence
  Synthetic
SAVEKAVRDVERTNEEIRRVVEEVRKEAEKTHRDIRRVVEEARETAERLLREIEELAKK

SEQ ID NO: 15780 - protein, 56 aa, Artificial Sequence
  Synthetic
EEAVKRLKDENKKTLDEVREIVKRLAEENKRLLEEVEKTVRDLKRELEKLLREVAK

SEQ ID NO: 15781 - protein, 60 aa, Artificial Sequence
  Synthetic
KEVEDVVKEIEEVLDRLRKEVKKIKEDSDRLNEEIEKVVTDLVKELDRLLREIDDLIRKL

SEQ ID NO: 15782 - protein, 59 aa, Artificial Sequence
  Synthetic
DRARKTLEDLKRRIEELLRRVDETNERLKRHSDDLLRDVKRRLDEVRERIDRLLDKAER

SEQ ID NO: 15783 - protein, 61 aa, Artificial Sequence
  Synthetic
DEVDEAVKRLREILRRIREIVEKVRKESEDVNDEIRRIVEEVTKRSEDALRELRELIRRNK

SEQ ID NO: 15784 - protein, 59 aa, Artificial Sequence
  Synthetic
ERVREELRKVEEDIDRLLKEVTELNERLKRHSEKLLRDVTRENRRSKEAVTRILEEARR

SEQ ID NO: 15785 - protein, 60 aa, Artificial Sequence
  Synthetic
SEVEELLDRLREVNKRIREEVRKVTEESKKAIEEIKRIVDDMVDKVRKILEKLKELIRDN

SEQ ID NO: 15786 - protein, 59 aa, Artificial Sequence
  Synthetic
DKAREDLRRVKEHSERLLREVTKLNKDVEKELKELLDEVRERLKDLKRRIDKILEEAER

SEQ ID NO: 15787 - protein, 59 aa, Artificial Sequence
  Synthetic
SVRERVKDEMEKVLRDDKEVSKRVTDEARKVLEEHRKITDEVRRRSKELIRELKKVRDE

SEQ ID NO: 15788 - protein, 59 aa, Artificial Sequence
  Synthetic
EEVRRTVDEVRRRIDKSLEESKKLVEDISREITELLRRTTERNKESKREVDKILEDARK

SEQ ID NO: 15789 - protein, 59 aa, Artificial Sequence
  Synthetic
SIVERAEKELRRLLKEDEEVSDRVRKEVKRLLKEDKEILDDVRRRIEKILREIEEVARR

SEQ ID NO: 15790 - protein, 59 aa, Artificial Sequence
  Synthetic
EDVRRIIKEIKERVKKSLDESREIIERAKREVDKSLEESKKVAEDAKRRIERLLREVER

SEQ ID NO: 15791 - protein, 60 aa, Artificial Sequence
  Synthetic
SEVEKVVREVEKLIREIERHSKEVNKRSKEDIDRIREKIERAIRRVEELIRKVKEVTERG

SEQ ID NO: 15792 - protein, 55 aa, Artificial Sequence
  Synthetic
EDLDRIRERLERLKKRTKELLERDEREVERVERELEELIRDIRRKIEKLKRDIEK

SEQ ID NO: 15793 - protein, 59 aa, Artificial Sequence
  Synthetic
SDLEDVIKKIEELLRRVEERLRDAVRKIEELLRASDERLREINEESRELLRRVKELKDA

SEQ ID NO: 15794 - protein, 56 aa, Artificial Sequence
  Synthetic
RKLVDDIRKEVERIVEEARKLLERIKREVKESSERAERLHEEDRKRVEDALREVKK

SEQ ID NO: 15795 - protein, 59 aa, Artificial Sequence
  Synthetic
KEAEDVLEKAKRLLKRSDEVVEEANDESRRLLDKIRKLVDTVNEESKRLLDRVRELREA

SEQ ID NO: 15796 - protein, 56 aa, Artificial Sequence
  Synthetic
KDAVRDVEREVRRSSKRLKELHEEDKRRVRKILERLKRLHEKDRRDLEKVMKEVED

SEQ ID NO: 15797 - protein, 60 aa, Artificial Sequence
  Synthetic
DDLDEVIKDIERLLKESDDDVERVIREIKKLLDEVRKRVRDANEDSKRLLREVERLAEAG

SEQ ID NO: 15798 - protein, 56 aa, Artificial Sequence
  Synthetic
ERLVREIERRVRKSSEDLRRRLEEIRERVEDIERELRKLHEEDKKRVEDILTEVRR

SEQ ID NO: 15799 - protein, 60 aa, Artificial Sequence
  Synthetic
SEKERVVEEVRKKLEEIRRRTEEMIERVERLLDEIRRRNKELVERNKELNKRIAEIVRDR

SEQ ID NO: 15800 - protein, 56 aa, Artificial Sequence
  Synthetic
SELARDIKRKLEKILEDSERLVDEIRKRIEKIKRESDETVRESRESSRRLLEEVKR

SEQ ID NO: 15801 - protein, 58 aa, Artificial Sequence
  Synthetic
SEVERLLEDNRRTIREDEERNKRVVDTWRELTRRLEERIEKVLTDNKKTVEDLVRKRG

SEQ ID NO: 15802 - protein, 56 aa, Artificial Sequence
  Synthetic
DDELRKDLERLDEESKRASEKLEEEVRREIKRSKELIEEVERKVEEIDKRADERLN

SEQ ID NO: 15803 - protein, 58 aa, Artificial Sequence
  Synthetic
SEVERVLEKLKRDVEKNERDNRRVLKKLREDVKKDADDNRKVLEDLRRAVEELRREVG

SEQ ID NO: 15804 - protein, 56 aa, Artificial Sequence
  Synthetic
TKDLVDEARKVLETSKRLSDELKKEVEKMLRESREMSKRLKEEVDRILKEVRDKAR

SEQ ID NO: 15805 - protein, 57 aa, Artificial Sequence
  Synthetic
DELEEVIDRNRKSLKEIEERNKKVIEDLRRAIKEIEDRLKEVLDRVKKRIEDIERRV

SEQ ID NO: 15806 - protein, 55 aa, Artificial Sequence
  Synthetic
EELRKKIEDVDRKVRKESEDLKRELKKLLDEIRRKVRELEERAKRVEEEVDREAK

SEQ ID NO: 15807 - protein, 57 aa, Artificial Sequence
  Synthetic
SELEEVIRDNERSLKEIEDKNREVTKTVREEIKRIAKKLKEVLDRNRETVRDIERRV

SEQ ID NO: 15808 - protein, 55 aa, Artificial Sequence
  Synthetic
DELRRRIKEVDKEVEEKSEKLKREVKAVLDRVEKLAEEIRKKVEDVDRTVEEKAR

SEQ ID NO: 15809 - protein, 59 aa, Artificial Sequence
  Synthetic
KEMEDLEREVERVLKRLEELVRELLETVRRTLTRLKRKLDEKKKELDKVNEDLDRVTRE

SEQ ID NO: 15810 - protein, 55 aa, Artificial Sequence
  Synthetic
ERVVKKLEDAIEEIKRKLEKVHDEHRRTVEKIEEDIRRVEEEHRRTIKEIKEKLK

SEQ ID NO: 15811 - protein, 59 aa, Artificial Sequence
  Synthetic
SESERLAKEVEKKLKDAERLVKELHEEVDRMNRDLERKLREISERAKKTTEDVERVAER

SEQ ID NO: 15812 - protein, 55 aa, Artificial Sequence
  Synthetic
EEVIKKVRKDIEEITRKLERSNREHERTLREIKKRAEKVHEDHRREIDRIREELK

SEQ ID NO: 15813 - protein, 59 aa, Artificial Sequence
  Synthetic
RESEELEREVERVLRELEELVKRLHDDVRRVDEELDRKVRDLHKKVRDVLRRVEKLVRD

SEQ ID NO: 15814 - protein, 55 aa, Artificial Sequence
  Synthetic
DRVVDRLRRKIEEIARRLRKSNEDHRRSLKEIKDKLEESNERLRRALEEIAERLR

SEQ ID NO: 15815 - protein, 60 aa, Artificial Sequence
  Synthetic
SEKDEVITRVETELRRVKTEDRDVARRVKEELEDLKRRLERVIEDNERTLRELKKELKER

SEQ ID NO: 15816 - protein, 55 aa, Artificial Sequence
  Synthetic
EDVVRELEKLLRDWEKRSREVEEKLRRLLDELRETLKEIEKELRRLDKEIKERLR

SEQ ID NO: 15817 - protein, 60 aa, Artificial Sequence
  Synthetic
DREEKVKRRVEEELDRVRRTDDRVLKRVEERLREDEKRNEEVIRRNEKTLRELEKRLRDN

SEQ ID NO: 15818 - protein, 55 aa, Artificial Sequence
  Synthetic
EDVVRELEELLKRWKETSERVKRELTDLLRKSEETSKEVTKTLRELDKRIEDELR

SEQ ID NO: 15819 - protein, 59 aa, Artificial Sequence
  Synthetic
SREEDLKRKIDEVDKEWKKLTKKLEEEIREVEKEWRKLSKELERKIREVEKRLKEAKDR

SEQ ID NO: 15820 - protein, 55 aa, Artificial Sequence
  Synthetic
EEVIKTLRERVKDIHREDKEIIDRLREKAERIKEHDRKLLEDLKRTLDKLRREME

SEQ ID NO: 15821 - protein, 59 aa, Artificial Sequence
  Synthetic
DEREEIKKELDRIIRESEELVKKIKDVIRKLIEESKRLVEKIREDIKRSNDKLDEVTRR

SEQ ID NO: 15822 - protein, 55 aa, Artificial Sequence
  Synthetic
EEVKRRAEDLLRRSDEKSKRIAEEAERRLDRSDEESEKILRDNEDMVRKWREKEK

SEQ ID NO: 15823 - protein, 59 aa, Artificial Sequence
  Synthetic
DETEKITKDLEDLIREDEKLVKDARDTLAKSNEDSRRLVEDLRRLIKESNEELERVVRE

SEQ ID NO: 15824 - protein, 55 aa, Artificial Sequence
  Synthetic
EDVVRRLERLSEESRERLERILRDNKRRLDKSLEDSKRLVEKNDRDLKKWKEDRR

SEQ ID NO: 15825 - protein, 59 aa, Artificial Sequence
  Synthetic
DERETVREELKELIERLRDLNRKIEELLRRSNEEIRRLVEEIRRRLKEMNDEIRRVLKK

SEQ ID NO: 15826 - protein, 55 aa, Artificial Sequence
  Synthetic
DKVLKEAKELLDASEKHLRDLIETNERVLKRWEEELDKIAEENERVLRKWEEEAK

SEQ ID NO: 15827 - protein, 61 aa, Artificial Sequence
  Synthetic
SEREEVLKKIREMSKRDNEKNKRILDDVRRLSKEDNKDNDRLVEEHRRKITELEDRVRKEG

SEQ ID NO: 15828 - protein, 55 aa, Artificial Sequence
  Synthetic
EVLREVEELSRRDEKRSKEILEEVSKLSKDDEDRSRDLLRKAEEENRRLEEKLRK

SEQ ID NO: 15829 - protein, 61 aa, Artificial Sequence
  Synthetic
SEKETVLEDIRRMSKEDNEKNERIVERARRILEKIEEKNRRVKEEAKKMLERIKKLVKDRG

SEQ ID NO: 15830 - protein, 55 aa, Artificial Sequence
  Synthetic
RVVDEVRKRSEEDERRSRELLEEVRRAVKRVEDKSRTTVREIRERVKEVKKRLDD

SEQ ID NO: 15831 - protein, 60 aa, Artificial Sequence
  Synthetic
SEVEDVVRKVRKLVEKSTRDNKRVLEKVRKLVKESSDKNKKVLDEVEELIERLREKLERI

SEQ ID NO: 15832 - protein, 56 aa, Artificial Sequence
  Synthetic
RDALEEIRKRVEDNKRRSDESLEEIRRLVEENKRRSEKTLKEIREKAKRLKDEIDR

SEQ ID NO: 15833 - protein, 60 aa, Artificial Sequence
  Synthetic
SEVEKVEREVDEMVRDSTKENEDILREVRERLKKIKEDLDRTVTEVRRLLKELEEKAREV

SEQ ID NO: 15834 - protein, 56 aa, Artificial Sequence
  Synthetic
KDMLDRVREKVKRNKEESDKSLDEIRRIAEEVKRRIDELLKEIKKRAEELKRKLRK

SEQ ID NO: 15835 - protein, 60 aa, Artificial Sequence
  Synthetic
SEVEEVLKRARELVERSTRENRKILERARKMLEDARKTNEDVLRDVERLLDELRRELEKI

SEQ ID NO: 15836 - protein, 56 aa, Artificial Sequence
  Synthetic
KEVLDEIRELVKENKKRSDDSLREAEKRLRELKEESDKTLDEIRRKLEKLKEEIDR

SEQ ID NO: 15837 - protein, 60 aa, Artificial Sequence
  Synthetic
DEVETVRKDVERLVRTSNDENRRILETARKLIKEVREKNKEVTDRVRDLLRRIEEEVKKV

SEQ ID NO: 15838 - protein, 56 aa, Artificial Sequence
  Synthetic
ERILEEIRRRVEENKKRSDESLKEARELLRDVERESDETLKEIEEEARRLKEEIDR

SEQ ID NO: 15839 - protein, 59 aa, Artificial Sequence
  Synthetic
DEVKKVVDEARKLVEDDKRTNEEVLRRTRELLERDERKNEEAVKRIRDLLKEIKKLVEA

SEQ ID NO: 15840 - protein, 56 aa, Artificial Sequence
  Synthetic
EELLKRIDELIKESKRRTKEAHRESEELARKTKKSTRDLLREVEKRLREIKEEIKR

SEQ ID NO: 15841 - protein, 59 aa, Artificial Sequence
  Synthetic
SDVEKVVDEVREKVKRDKEDNRRVAKEARELVKESSEKLERLVTEVKKLIKTIEKLVRD

SEQ ID NO: 15842 - protein, 56 aa, Artificial Sequence
  Synthetic
DELLKEIDKLIKESKKETDDLLKEIKDLIDENKRRIDKLLREIEKLARKVKRDIEK

SEQ ID NO: 15843 - protein, 59 aa, Artificial Sequence
  Synthetic
SDVEKVVEELRRLVRKDEEDNRRAVEETRRLVEDSSRKLEEMVRRVRDLIRKVEELVKS

SEQ ID NO: 15844 - protein, 56 aa, Artificial Sequence
  Synthetic
ERLLREIEKLIRESKKKTDDLHRESKKLIEDNKKRIDDLLKEIKDRVERVKEEIRR

SEQ ID NO: 15845 - protein, 59 aa, Artificial Sequence
  Synthetic
DEVKKVVDEVRKKVEEDKDDNRRAVKETRELVEESSRDLKRLVETSRRLIEEVERLVEK

SEQ ID NO: 15846 - protein, 56 aa, Artificial Sequence
  Synthetic
ERLLREIRKLITESKKTTRDLHRDSKRLIDENRKRIRDLHEETRKLVKEVLDKIRK

SEQ ID NO: 15847 - protein, 59 aa, Artificial Sequence
  Synthetic
SDVEKAVDEVRKLVKDSNEKVERVLREVRKLIEEDERKNREVFERVRKLIEDILRLVKG

SEQ ID NO: 15848 - protein, 56 aa, Artificial Sequence
  Synthetic
EKLLRDIREEIERNRRELEKALREIKKEIEKTKRKTDRLLETIKELIDRVVEEIKR

SEQ ID NO: 15849 - protein, 59 aa, Artificial Sequence
  Synthetic
DEVETVKRRVEELVKRSNEELKRIVEETRRRVEDDERDNERIIREIKKKLKDIEELVKS

SEQ ID NO: 15850 - protein, 56 aa, Artificial Sequence
  Synthetic
EEILKTIRRLIEKNREDIDRLHEESKREIDRTKERTDRLLDDVRRIAERIKEEIDK

SEQ ID NO: 15851 - protein, 59 aa, Artificial Sequence
  Synthetic
REVEEVLKEVDELVRKSNEDLKDIVRRTRDLLRKDKERNDEVVRRSEELIRRVEELVRR

SEQ ID NO: 15852 - protein, 56 aa, Artificial Sequence
  Synthetic
EEALERIKRKIDENEKEIRELHKESEKRIRDTLRATDKLHKDTRRRVEEVKEEIKK

SEQ ID NO: 15853 - protein, 59 aa, Artificial Sequence
  Synthetic
SDVERVVERARDLVRKSDDDLRKMVAETKRLVEESSKKLDKIVRESRELIRDVKRLVEE

SEQ ID NO: 15854 - protein, 56 aa, Artificial Sequence
  Synthetic
EELLKEIKKRIDESREKTKRLHEESRKLIEDNKRRIDELHKETKEEVERAKKEIED

SEQ ID NO: 15855 - protein, 60 aa, Artificial Sequence
  Synthetic
EEVKRALEELDELVKRIEEDSRRMVKEAEDLVEKIRKEIEDLLRRSRKLNEDIRRLIDRD

SEQ ID NO: 15856 - protein, 56 aa, Artificial Sequence
  Synthetic
EDILRRADELLKRLRRKDEELTKKIERLLEKVAKEVEDINRESKRSADEVRKRVRK

SEQ ID NO: 15857 - protein, 60 aa, Artificial Sequence
  Synthetic
SSVKEVRDELKRLVDEIRKESEDMVERLRRLVEEIRKRNEELVRRSEELNERARRLIERD

SEQ ID NO: 15858 - protein, 56 aa, Artificial Sequence
  Synthetic
DKILKEAEDLLRDLERRDRELTREVEKLLEELRRTSEETNKRSKESADRVEDEVRR

SEQ ID NO: 15859 - protein, 60 aa, Artificial Sequence
  Synthetic
KEVEEALKRVRELVKRAEDMNEELLRRSRKLNDEIRRRIEEMLRRLEEVVRRIKELVDRD

SEQ ID NO: 15860 - protein, 56 aa, Artificial Sequence
  Synthetic
EKILTEIEKRLKDLEKKSRDSNRESEESLERIRRKVEEIARRVRELLDRLRREVER

SEQ ID NO: 15861 - protein, 57 aa, Artificial Sequence
  Synthetic
SRLEEVTRRARKLVEDITRELRKAVEDSRRVVDKIRRLNEELTRRSRELVKEVKDKV

SEQ ID NO: 15862 - protein, 59 aa, Artificial Sequence
  Synthetic
EKVREILEEIRRLLEELEREVKELNEESKRRLDELEKRSEETNKESEDLLEKVRRDVEK

SEQ ID NO: 15863 - protein, 57 aa, Artificial Sequence
  Synthetic
SELEDVVRRLDELVKRIKEENRETLERSRRLVEEAKRTNEETEDRMRRLVEEIEKKV

SEQ ID NO: 15864 - protein, 59 aa, Artificial Sequence
  Synthetic
EEVRRLLEEIRRKLEDAKRHVEELSEESKKLLKELEEHVREVNKKSEKLLRELKDKVKT

SEQ ID NO: 15865 - protein, 57 aa, Artificial Sequence
  Synthetic
SELEKLVEDVRRLVEKIKRDNRKTLKELEELVREIVERNRDTLRRSRELVDRIKKRV

SEQ ID NO: 15866 - protein, 59 aa, Artificial Sequence
  Synthetic
EDVRRVLKEIKELLERVREHVERLNRDSERLLKDLEEHARRLSKESKELLRELEERVRT

SEQ ID NO: 15867 - protein, 60 aa, Artificial Sequence
  Synthetic
SEVEKIREDVKKLIEESKKLNRDILEEVRKMIERWRDTTRRIRERIRKLIEEAEEEIKRS

SEQ ID NO: 15868 - protein, 56 aa, Artificial Sequence
  Synthetic
SEVLEEVKRLVEESKRESDEILKRVKKLVDDLARTDDKVLEDIKREVDRLKKELED

SEQ ID NO: 15869 - protein, 60 aa, Artificial Sequence
  Synthetic
SEVEKIKKDVDRMITEWEKRSRDIAKTVDELIEDSRRLNETIRRDVDRVARELKERIKRT

SEQ ID NO: 15870 - protein, 56 aa, Artificial Sequence
  Synthetic
DDVLKKIEEALKRLADRDDDILRRIETLVRKTRRESEELLKEVEDKMRKLKEELRR

SEQ ID NO: 15871 - protein, 60 aa, Artificial Sequence
  Synthetic
SEVEKLTEDVKRLIEKSKRNNRDILRKVKEDIDEWRKRTKKIADEVRKTERDLEEKIKRT

SEQ ID NO: 15872 - protein, 56 aa, Artificial Sequence
  Synthetic
DEVLRRIEEDLKRSKKETDDILKEVKDLLTDLLRRDDEVLEEIKRRAERIKEEIDR

SEQ ID NO: 15873 - protein, 60 aa, Artificial Sequence
  Synthetic
REVEKILTDVRRLIEEWRKKTEDIKREVDKLIEEWRKRSDEIADRSRKLAEEIERLLREG

SEQ ID NO: 15874 - protein, 56 aa, Artificial Sequence
  Synthetic
ERVLRKIRRDLERLKKTDDDVLKTIEKKLRELEERDRRLHKESREIAEKLKEDIDR

SEQ ID NO: 15875 - protein, 60 aa, Artificial Sequence
  Synthetic
DEVETIMEKVERDVKRWEELTREIKRRSDKLIEDWKKRSEEVLRESTELIKTIEKLLREG

SEQ ID NO: 15876 - protein, 56 aa, Artificial Sequence
  Synthetic
ESVLRTIDELVRRLEEEDRKVHEESKELARRLEKEDKRLHEESKKLIDELEKKIRD

SEQ ID NO: 15877 - protein, 59 aa, Artificial Sequence
  Synthetic
SEVEKILDEVRKLVKKWDDETRKILEEIDKLIEDSERLLEKIERRSKKLADEIRDLLRK

SEQ ID NO: 15878 - protein, 56 aa, Artificial Sequence
  Synthetic
KSVLDEIRERVTRAKEKDKRVLERVKREVERTKEESKRVHEKSREIIERLKKEIDK

SEQ ID NO: 15879 - protein, 57 aa, Artificial Sequence
  Synthetic
DEVRKVRKELDDAVRKLRRDHERVIRESEKVSKEIEDRARDVERRLDKVVDELRKKD

SEQ ID NO: 15880 - protein, 55 aa, Artificial Sequence
  Synthetic
EEVMKRLRDMIRRLKEDAEKLKRELKRRHERVKELLDKVRRELEKLEKEVDDKVK

SEQ ID NO: 15881 - protein, 57 aa, Artificial Sequence
  Synthetic
DEVREVERESEELSEELRRRHEEVVKESEEVSKEIEERIREVIRDLRRVLRKLEEDG

SEQ ID NO: 15882 - protein, 55 aa, Artificial Sequence
  Synthetic
EEVVKELRELHDRSRKKVEDIAREARDMHRKAADKLRRLMEDLKRVLEEIRKKVE

SEQ ID NO: 15883 - protein, 56 aa, Artificial Sequence
  Synthetic
SRVDKIRRELRELLERDREDLERAMRELRKIDKDIDERLKEVVERLRRIDERIDRE

SEQ ID NO: 15884 - protein, 55 aa, Artificial Sequence
  Synthetic
KEVEKEVEDAIRETEKRAREVEEENRKSVEDVRRKMKKVEEENRKSVEDVRRKAT

SEQ ID NO: 15885 - protein, 56 aa, Artificial Sequence
  Synthetic
SRVDKIRKELEDLLREDEKRIRDMVKRLREIDEKIDRELEKVARELRELLKRVEDS

SEQ ID NO: 15886 - protein, 55 aa, Artificial Sequence
  Synthetic
EEVEKKVRELVERTEETVRDVERENKESVKRVREKAETVKREVEKRAKEVRDKAK

SEQ ID NO: 15887 - protein, 60 aa, Artificial Sequence
  Synthetic
SEMEEVEERLKELDDKDKRDVDEARKRLEKLDRDIDRRIKEVTKRLRDLNRRIEEELRRN

SEQ ID NO: 15888 - protein, 55 aa, Artificial Sequence
  Synthetic
EEVEKKNRKSADDSRETAKRVEEENERTIKRLEEELREVEEEDRKTVEDLRRTLK

SEQ ID NO: 15889 - protein, 60 aa, Artificial Sequence
  Synthetic
DEVREVTKELRDLDREDKKRVEEATKRLRDLNEEDKRLVKKVADDLREDLKRIRERLERN

SEQ ID NO: 15890 - protein, 55 aa, Artificial Sequence
  Synthetic
EEVEKENERSVKKSEEDLKRVKDEDEESVKESRKAVREVEEELRKRLKELREELK

SEQ ID NO: 15891 - protein, 57 aa, Artificial Sequence
  Synthetic
SEDETVRREVRELIRRLRKHSEDVKRESDKLLDEIRRRVKEVEDRVKEAVERLDRKK

SEQ ID NO: 15892 - protein, 55 aa, Artificial Sequence
  Synthetic
EDVVRKIRTVVKKIEEDNKKTADELRKLHKDIKKEVDDMEKRIRKVLDEIDKEIK

SEQ ID NO: 15893 - protein, 57 aa, Artificial Sequence
  Synthetic
DEEERARRELEDLLRRLREHSERVAKEVEEVVERNRRKSEEVEKRVREMLKRLDEKK

SEQ ID NO: 15894 - protein, 55 aa, Artificial Sequence
  Synthetic
KDVVKEIRDRVREAERRNREVVEEIRKLLKEIDKTTRDVEEEIRKLLKRIDEEIN

SEQ ID NO: 15895 - protein, 57 aa, Artificial Sequence
  Synthetic
DEERKARTEVKKEVDDLKKHVKDVADEVREAVKKNRRKSEEVSREVRDLIRRLKETK

SEQ ID NO: 15896 - protein, 55 aa, Artificial Sequence
  Synthetic
EDVVREIRELLKRIREENRRTVEEIRKLLKRIDEATEELVREIRRVVKEIEDKIR

SEQ ID NO: 15897 - protein, 57 aa, Artificial Sequence
  Synthetic
DREEKLRKELKKLIDDDRKKSEDVEREVRKLIKENEDKSRKVEEEVRKLAEELDTKK

SEQ ID NO: 15898 - protein, 55 aa, Artificial Sequence
  Synthetic
EEVIKEIRTVVKRVNEESEEMTKRIRDVVREADKTTEDVRRKIEDMVRRIDERTN

SEQ ID NO: 15899 - protein, 60 aa, Artificial Sequence
  Synthetic
DELRRIEEEVRRRFEEMARRHRKVKRDIEELVKEVTKRNKDTEREIEELVKRMKDEIDRI

SEQ ID NO: 15900 - protein, 59 aa, Artificial Sequence
  Synthetic
EEKVRRVVKKAREAVERSSREVEKVEREVKKLLDDLKKHSEEVEKKVRELLKRLEDRAR

SEQ ID NO: 15901 - protein, 60 aa, Artificial Sequence
  Synthetic
SELEEIVKTAREIMDRVRREHDRVATEIRELVKRLEEANRRVREEIKRLVKEVEERIRKI

SEQ ID NO: 15902 - protein, 59 aa, Artificial Sequence
  Synthetic
REEVEKVVKEIEDVVRESSERVRRVVEEVKKLLRELAKHSEDVEREVRELLKKLAREVD

SEQ ID NO: 15903 - protein, 58 aa, Artificial Sequence
  Synthetic
DELKEIRDRIKKRVEELRRENEEVREEIERIVRKAREDHRRVERELEDLVRRARDKVE

SEQ ID NO: 15904 - protein, 59 aa, Artificial Sequence
  Synthetic
EEEVRRVVKEVEELLEDLKRHSEKVKEEVKRLLEESSREVERVEEKAREMLERLRERAR

SEQ ID NO: 15905 - protein, 60 aa, Artificial Sequence
  Synthetic
SEAEKLRDEIRRIVEKAERDHEDVKKKIEDLVKRVEERNREVTKRIRDLVRDARRRLDEI

SEQ ID NO: 15906 - protein, 59 aa, Artificial Sequence
  Synthetic
KDKLKKVEEEVEELLKKSNRKVREVKRELKELLDRLAKHSDEVRREVEELLRDLARRAT

SEQ ID NO: 15907 - protein, 60 aa, Artificial Sequence
  Synthetic
SELEKIREDMRELVERLKEANDRMREKIRKILEDVDREHEEVRKRIEELVKRARETIERI

SEQ ID NO: 15908 - protein, 59 aa, Artificial Sequence
  Synthetic
KDKVKKVKEDVKRLLDELRKHSEKVIREVEKLLRESNEKVKRVKEKLEELLRRLRERSR

SEQ ID NO: 15909 - protein, 56 aa, Artificial Sequence
  Synthetic
DEIETIKKEIDDMLREIKREVERSKEEIDRALKRIREEVKKSEEEIDKALEELRRN

SEQ ID NO: 15910 - protein, 59 aa, Artificial Sequence
  Synthetic
EEIIKRLLEKIRREARKVKELIRTSNEEVRKRLKDLEELIRKSHEDVRRTLETLERETR

SEQ ID NO: 15911 - protein, 60 aa, Artificial Sequence
  Synthetic
DKERELDKEVRDMIDTLRDSNRRINERSERVLRELDESVKKNEEDIRRAIEELKAEVRRD

SEQ ID NO: 15912 - protein, 55 aa, Artificial Sequence
  Synthetic
EKVLKEIRDLARKIKEDNDRSLEDNDRLAKEIKERNKRVHDETRKMLEDIKRELT

SEQ ID NO: 15913 - protein, 57 aa, Artificial Sequence
  Synthetic
DEDKEIDERVKTVKEEIRRRSKKDKEEVDRVLKESDETLKRILEEVKKVLKEIEERV

SEQ ID NO: 15914 - protein, 59 aa, Artificial Sequence
  Synthetic
EEELRRIVERVRERVTELREKLKEIHKRTREVADELRKNNRRWEEDVRRLVKELREREE

SEQ ID NO: 15915 - protein, 57 aa, Artificial Sequence
  Synthetic
DEEERIRTKVEKVKRELEEKSERDKRALEKVEDESRRTSEEDERELERVIEEIIREV

SEQ ID NO: 15916 - protein, 59 aa, Artificial Sequence
  Synthetic
EEELRRIEREVDRAVKELDRLLRELHRRTREVVKELRDLDRRIHEDTRRVVREAREEVR

SEQ ID NO: 15917 - protein, 57 aa, Artificial Sequence
  Synthetic
SEREEIEERVERVERESEDTSRRDEEALERVLRESEDTSRKDREALRKALEDIEREL

SEQ ID NO: 15918 - protein, 59 aa, Artificial Sequence
  Synthetic
EDVLRRIMEDVKRVADKLRELDKKIHEETRRAVDDLRRLDKEIHDRTRKLVKELREEAK

SEQ ID NO: 15919 - protein, 59 aa, Artificial Sequence
  Synthetic
SEIEEITKDLRRLVEEIERLNKRVEDENERTAKELRDRVREAEKKNRKTVDDIRKLIED

SEQ ID NO: 15920 - protein, 55 aa, Artificial Sequence
  Synthetic
DEVRREVDELIKKSRETLKRIERRSEEVAEELERRLRDIKRRSEDMVRELEERAK

SEQ ID NO: 15921 - protein, 59 aa, Artificial Sequence
  Synthetic
DEKEKVTKKIEELLKAIEDKIREVEKRSRDSAKEIEDRNREVEKRNKDTVRRIRELIER

SEQ ID NO: 15922 - protein, 55 aa, Artificial Sequence
  Synthetic
EEVRKRLEDAVERIKKELKRIKDENDEVVKKSRDSLRRIKEDSERVVRELEERAK

SEQ ID NO: 15923 - protein, 59 aa, Artificial Sequence
  Synthetic
KRKEDIERRIEKLVRDDRRLVREAEKRSKESVDRLRDLVDKARKESDESARTIDKLIKD

SEQ ID NO: 15924 - protein, 55 aa, Artificial Sequence
  Synthetic
ERVRKRLEDVVRESKKRLDEIKKRNEDVVRELEERLRRIEERNRRVAEELKRKAK

SEQ ID NO: 15925 - protein, 56 aa, Artificial Sequence
  Synthetic
SEIEDIERELRESNKRHEDTLRKIKRDLEDSNRRHRETIRDIEARLEEVIKKLRED

SEQ ID NO: 15926 - protein, 56 aa, Artificial Sequence
  Synthetic
EEELRELVKRVHERAERVNRDLKRKVKEVHDRVREVNKELRRKVEELKRRAEERRR

SEQ ID NO: 15927 - protein, 56 aa, Artificial Sequence
  Synthetic
SEIEDIKRKLDDVIREHARTLKEIKDELKKSNERARERIEDIDRKLRDVERRLRES

SEQ ID NO: 15928 - protein, 56 aa, Artificial Sequence
  Synthetic
VEELEDLVRRLKKRVEEVNKRLREKVKRLHDEVDRVLRELEEEVKKLKEDVERAAK

SEQ ID NO: 15929 - protein, 56 aa, Artificial Sequence
  Synthetic
SEREKIEEDIKKALKEAREVVERIKKKLDDSNREHKRTLDEIKKKLDEVIDEVRKS

SEQ ID NO: 15930 - protein, 56 aa, Artificial Sequence
  Synthetic
EEEIREDLERIVTEVKKVLDELDKLVKDLHDEVRKVNEELDRKVKKLRKEAEEKTR

SEQ ID NO: 15931 - protein, 56 aa, Artificial Sequence
  Synthetic
SEIEEIKRRLEDSNRRAREVIKRIEDELRRSNEEHRRTLKEIKEELDRVLEELKRK

SEQ ID NO: 15932 - protein, 56 aa, Artificial Sequence
  Synthetic
EDELREVVKRVHDEVRRELKKLEELVKKVHEDAKRVNEELRRKVKEVKERAERDVR

SEQ ID NO: 15933 - protein, 59 aa, Artificial Sequence
  Synthetic
RREEEVEKRLDDARRRLEKSNRDDERLTRTVEEELKRSNDEIRKRLETAMRELKKLVKD

SEQ ID NO: 15934 - protein, 55 aa, Artificial Sequence
  Synthetic
EEVERRLEKVEEDSRRELKRSEKRSDEVARDSERLLDEWRRRLEEVIRRVKEETR

SEQ ID NO: 15935 - protein, 59 aa, Artificial Sequence
  Synthetic
SREETVRERLREVAERLKKSNREIEELLKKAAEELKESNTRDKKLSEDVSRRLEKLSRD

SEQ ID NO: 15936 - protein, 55 aa, Artificial Sequence
  Synthetic
EEVEERLKRVIEESERRLDKWRRDLDRVIKESEDLLKKSREDSERVVREVEKKEK

SEQ ID NO: 15937 - protein, 60 aa, Artificial Sequence
  Synthetic
SEIEEVERMLEDLERRVREADKRVREESKKLEDEIRREDKRVEEMIDEVRKKVDELDRDV

SEQ ID NO: 15938 - protein, 59 aa, Artificial Sequence
  Synthetic
KDEVRRIEEEVDRVIEENRETVKEIEERNRRVLEANRESLRELEERLKRILEEVRRRSK

SEQ ID NO: 15939 - protein, 60 aa, Artificial Sequence
  Synthetic
SEIDEVRREVEELERRAEEVDREVERRSKELKERVDDVDRRSRELSKRLKDTADEVRKRV

SEQ ID NO: 15940 - protein, 59 aa, Artificial Sequence
  Synthetic
KDKLETIRRRLEEVLKRNKETVDEIRRRNEDVIRRNEESLEKNERDLRRVLDEVRRSAT

SEQ ID NO: 15941 - protein, 60 aa, Artificial Sequence
  Synthetic
SELEKVDELVKRLMKEVRDVDRRSEKLTEELERKVREMDRKSKKLSEDLERDARRVEKEV

SEQ ID NO: 15942 - protein, 59 aa, Artificial Sequence
  Synthetic
KDALRAIEKKLEDILRRNEETLRRNEDKIRRIIETNKRSLEENRRRLEEVLRRVKESAR

SEQ ID NO: 15943 - protein, 60 aa, Artificial Sequence
  Synthetic
SITEKVERLIRELERKVKEIDDDLRRTSEEIMKRARKADEDSERLSERLRELVDRLDREV

SEQ ID NO: 15944 - protein, 59 aa, Artificial Sequence
  Synthetic
RESAERLKEELRRVLEENRETLERLREENERVLEENKRRVDENREKIKEVLRRVEERTR

SEQ ID NO: 15945 - protein, 60 aa, Artificial Sequence
  Synthetic
SITERVEEDIKRLMEEAKRVDDKVRKLVEELMRDVKRVDKELAELVEELERRVKDLTRRV

SEQ ID NO: 15946 - protein, 59 aa, Artificial Sequence
  Synthetic
REEAERLKEELRRVLEENRRTVEEIERRIKRVLEENEETVRRLEKRIEEVLRDVREKTK

SEQ ID NO: 15947 - protein, 57 aa, Artificial Sequence
  Synthetic
SKVEELKRRLKKVRDDDRRSVEKLRETLRRVLARDRDEIREAERELREALKRLEDAG

SEQ ID NO: 15948 - protein, 55 aa, Artificial Sequence
  Synthetic
EDVLRDVERVVREVLEKNKKILKEVKEVVEESLRNVRDLIRRAREIVKEIVDRVK

SEQ ID NO: 15949 - protein, 57 aa, Artificial Sequence
  Synthetic
KEVEDLRRELEEAKKRDKDLIDKLKRRAEEVKEEDERSIRENKKALRKAEEDLRRKG

SEQ ID NO: 15950 - protein, 55 aa, Artificial Sequence
  Synthetic
ERVLEEVRKTLKRSMENVEELEKELEELVTRVRDHNRRDHEETRRLLEEIKRRVD

SEQ ID NO: 15951 - protein, 57 aa, Artificial Sequence
  Synthetic
DEVERLKEKLEEVRRRDEEIIRKLEEDLERVKRDDDRLVRENEEELKRVEEKLERDG

SEQ ID NO: 15952 - protein, 55 aa, Artificial Sequence
  Synthetic
EEVLRRVEEAAKRSLDNVDKLEKDVADLVRRSMENVRDLHRRTRRLLEELKEKVK

SEQ ID NO: 15953 - protein, 60 aa, Artificial Sequence
  Synthetic
SEKEKVLEDAERVLREIKKKNEKALREAEEVARRIAEEVKRIHDRSKEVVDDIKRLADAG

SEQ ID NO: 15954 - protein, 55 aa, Artificial Sequence
  Synthetic
KDVERRVREAKKENDKSVDEIREEVKRVKDELDRLSERNEEELEKVERDLRRRAK

SEQ ID NO: 15955 - protein, 56 aa, Artificial Sequence
  Synthetic
DEEKKVLDKLRELATRLSRRVEEAHRESEKIAEEIRRRAEKVLRESRKTVEEIKRS

SEQ ID NO: 15956 - protein, 55 aa, Artificial Sequence
  Synthetic
ERIKDDVRRMKKELEDLIEENRRRVEKVKEDIRRLIRELEARNEDVDRELRRKED

SEQ ID NO: 15957 - protein, 56 aa, Artificial Sequence
  Synthetic
SRLEKVEKELEELAREDKERIKRVIDDIRRLVREDEERIKEMHKKTEDIVRAIEEE

SEQ ID NO: 15958 - protein, 55 aa, Artificial Sequence
  Synthetic
ERIKKRVEKLKRDSKRLIDELRKELEEVVKRSEDLIKENRDTVKEVSDRIREKAR

SEQ ID NO: 15959 - protein, 56 aa, Artificial Sequence
  Synthetic
DDEERVLKELKKLVEDDRKKIEDVIETIERLAREDVERIKRVIEELRRLVKELEDG

SEQ ID NO: 15960 - protein, 55 aa, Artificial Sequence
  Synthetic
EEIKEDVKRAADESEKLIRELRKAVKRVEEESRRLIEELEREVKEAEERLKRRTK

SEQ ID NO: 15961 - protein, 60 aa, Artificial Sequence
  Synthetic
EEVERLLEELKELVRRIEERLKRAHDEMEDLVRRIKEEIKKLHEDTKRVVEEIRKLIERD

SEQ ID NO: 15962 - protein, 58 aa, Artificial Sequence
  Synthetic
ERVKEAEDRVRDAVRRLKRLLEEHKKASEKVVRELERLLEENRKTVKEVVDRLREESR

SEQ ID NO: 15963 - protein, 60 aa, Artificial Sequence
  Synthetic
REVEELIKELRRLAEEIRDRIRKLHKEMEDLARDIERRIEELDRELERVATEIAKLIERD

SEQ ID NO: 15964 - protein, 58 aa, Artificial Sequence
  Synthetic
EDIKRLEEEVRKVEEELKKLLKEHRDANKEVVDRLKRRIEEHKRKTKDLKEELERRMR

SEQ ID NO: 15965 - protein, 60 aa, Artificial Sequence
  Synthetic
DEVEEVIERLRRLAERIEERLREMDRRLEELVERAKRTIERLHEELEKLVREAEELIRRD

SEQ ID NO: 15966 - protein, 58 aa, Artificial Sequence
  Synthetic
KDVTRLEEELRRVVKKLEDLLREHKEKSDRAVEDLERLLTEHKKRNEDVIRRLKEASD

SEQ ID NO: 15967 - protein, 57 aa, Artificial Sequence
  Synthetic
SEVEEIRKKAEDVMRRLEELDKRLDEVLKKVSRELEKSDKDLEDRIREVIRELEERG

SEQ ID NO: 15968 - protein, 55 aa, Artificial Sequence
  Synthetic
DEMERRLEEVVKEAERRSEEVLRRLEKVVKDIKKKSKEILDRLEELVREIRERVR

SEQ ID NO: 15969 - protein, 56 aa, Artificial Sequence
  Synthetic
SESEEIDREAKKVEREVREMSRRNDEELRRVAKESEDSVRRVEDRVREVSEEVEAR

SEQ ID NO: 15970 - protein, 59 aa, Artificial Sequence
  Synthetic
EKELTEILKRLKDLADELRKLLEDVHRRSKKAADEDRKLNEDILKELEDLARELRKKTK

SEQ ID NO: 15971 - protein, 56 aa, Artificial Sequence
  Synthetic
DEEKKVRDEIRRAEEESRRSSKRNEDELRKVKEEIERRLEEVRRKAKEVEEKVRRE

SEQ ID NO: 15972 - protein, 59 aa, Artificial Sequence
  Synthetic
EEELRRILERLKEMVERDKETNEEIHRRSKDVVDKLRRRIEDIKRRLDELAEKLKEDTR

SEQ ID NO: 15973 - protein, 56 aa, Artificial Sequence
  Synthetic
DDERRIRETLKRADEEVEKALREVREHTKDVERENEKLSKENKERLEEVKKRVDDS

SEQ ID NO: 15974 - protein, 59 aa, Artificial Sequence
  Synthetic
KDVLRKIEKEIEEMVKDLRRLLKEVEDKDRTLAEELRRINEDIHRRSEEMKKELDDRTR

SEQ ID NO: 15975 - protein, 60 aa, Artificial Sequence
  Synthetic
KEVEDVEEKIREIVERIRDEARKAEERNRDTVRRIEDVARKLHKRTKEIVDEIRDVLTKR

SEQ ID NO: 15976 - protein, 59 aa, Artificial Sequence
  Synthetic
KEMLETIKRKVEKVKEDLRKKIEDIEKHTRDVEDKVRKELERNEKKSRDVKEEVERRLT

SEQ ID NO: 15977 - protein, 60 aa, Artificial Sequence
  Synthetic
SELEKAEKENKDSADEIREVLKRLEEENRETAKRIEKHTRDAHRKTEDIVRRIEEVLRRR

SEQ ID NO: 15978 - protein, 59 aa, Artificial Sequence
  Synthetic
KEALKRIRDHVEEVRREVEELLRKIREHTKEVAEKVRRENEKNKKRSEDVRKKVEDDER

SEQ ID NO: 15979 - protein, 60 aa, Artificial Sequence
  Synthetic
SEVERVLEENRKSAKEIEDELRKVLRENEKSAEDIEREIDKAEKENRETVKDLRRVLTER

SEQ ID NO: 15980 - protein, 59 aa, Artificial Sequence
  Synthetic
KEKLETIERHVRKVEEDVERMLKEIERRTRDVMRKVDKLIKEIEKHTREVAKEVKEAED

SEQ ID NO: 15981 - protein, 56 aa, Artificial Sequence
  Synthetic
SLVEDLERKLEESTRRDEESMKRVREILKELEDRDRKSVKEIEDELRKARKEVKDS

SEQ ID NO: 15982 - protein, 59 aa, Artificial Sequence
  Synthetic
EEMAREVIKTLEKVSRELEETNRRVIDRIRKLAEEILRKNKEVLERLRKIVKEIKEKAK

SEQ ID NO: 15983 - protein, 56 aa, Artificial Sequence
  Synthetic
SLVETLKKILDDSTRRNEELIRRLEEELKRIKETNERTVRELERELKRAEEEIERQ

SEQ ID NO: 15984 - protein, 59 aa, Artificial Sequence
  Synthetic
EEAAKRVIERLRRLSERNVRTLEEIIKTLRDLARRSKERDDEVLEELKEMIRRIEEKSK

SEQ ID NO: 15985 - protein, 57 aa, Artificial Sequence
  Synthetic
DELEKVVRELEELAKEILKKLDEIIRDTERLVREAVKRLRELIERTRRLMDEVRKKV

SEQ ID NO: 15986 - protein, 59 aa, Artificial Sequence
  Synthetic
EKVMRELEDTVRRVREELRKLLEEHNRRVKKVLEDLDRLLDEHRKIVEDIKRDLDRREK

SEQ ID NO: 15987 - protein, 57 aa, Artificial Sequence
  Synthetic
SEIEKVLEELRELVKKAVTDLRRIIEESKRLADEAAKALKDIIRRSEELADRLRKEI

SEQ ID NO: 15988 - protein, 59 aa, Artificial Sequence
  Synthetic
EKLARELEDVVRKVKETLDRLLEEHKEIIERIKRTLDKLLKEHNEIVERIKRDLDRRRK

SEQ ID NO: 15989 - protein, 57 aa, Artificial Sequence
  Synthetic
DEMEKVIRDDEKLLEDVLRRLAEIIRRTEKRAEEMVRELEKLIEDSKRKADDVRKRV

SEQ ID NO: 15990 - protein, 59 aa, Artificial Sequence
  Synthetic
EEVVKRLDDIARDVNRTLDKLLKDHNEIVERIERTLDELLKEHNEIVKRIKEDLDRKRK

SEQ ID NO: 15991 - protein, 57 aa, Artificial Sequence
  Synthetic
DDAETVIERDRKLADEVAKELKRLIEETRDLARRIREELRRLIEELKTLAKRAKDEV

SEQ ID NO: 15992 - protein, 59 aa, Artificial Sequence
  Synthetic
RDVVRELREIARKINEDLDDLLRKHNEIVEKIKRDLDRLLEEARKILEEIKRELDETKK

SEQ ID NO: 15993 - protein, 60 aa, Artificial Sequence
  Synthetic
DEEERLRDSVRRSRELIKEIRKRLEESIRRSERINERVREELRRSVRESERSAEEARRRG

SEQ ID NO: 15994 - protein, 56 aa, Artificial Sequence
  Synthetic
TETVLEEHKERVKRILDRARDLLRKHRELVEDSRRHLEKLLRDHRKVVKEIEDKIR

SEQ ID NO: 15995 - protein, 59 aa, Artificial Sequence
  Synthetic
SEEERLRESLERSRKRLEEVKRELERKLEEWEEIVEESRRRAEKSLRESKERIDDLKRR

SEQ ID NO: 15996 - protein, 56 aa, Artificial Sequence
  Synthetic
TEEVLRRHEKVVRRIDEELEELLEELERVIREDTERNKKLLDEHREVVKEIEERVR

SEQ ID NO: 15997 - protein, 60 aa, Artificial Sequence
  Synthetic
SSEKRLRDSVRESRDRARKIEEDHRRLVEEWERLVKRSEEEVRKSVEESREEVEKAKKEG

SEQ ID NO: 15998 - protein, 56 aa, Artificial Sequence
  Synthetic
TDKVLEDHKRLVEKILKEAEDNLRRSRKMIREDEERNRDLLRRHREVVKEVKRKVD

SEQ ID NO: 15999 - protein, 59 aa, Artificial Sequence
  Synthetic
DKEERLRESLEKSDRDIRRIKEELERLLREWEKRVRDSEKELRDVLRKVTEEAKELKKQ

SEQ ID NO: 16000 - protein, 56 aa, Artificial Sequence
  Synthetic
TDDLLRRHKEVVEKILREIEELLRELREAIRRDKKRNDELLKRLAEVAEKIREDVR

SEQ ID NO: 16001 - protein, 60 aa, Artificial Sequence
  Synthetic
SEKETLERSIRESERILEEVLRELKKVLDEWRRRVEESEKRHRDLIEEVRRRAKKLREDG

SEQ ID NO: 16002 - protein, 56 aa, Artificial Sequence
  Synthetic
TDDLLRRHKELVEEIKELLERLLRELEEVIKRDKDKNDENLTRSKRLIEEIEERVR

SEQ ID NO: 16003 - protein, 60 aa, Artificial Sequence
  Synthetic
DSEERLKESVKRSEDDLKRLRDEHRKLVEEWRRRIDESERRHRKLIEDVRRRLTEFRKRG

SEQ ID NO: 16004 - protein, 56 aa, Artificial Sequence
  Synthetic
TDRLVEEHKKMVKEIRDRVKANLERSRRMIKRDKEKNDDNLRRSKELIDKLEEDVR

SEQ ID NO: 16005 - protein, 59 aa, Artificial Sequence
  Synthetic
SKEERLRESSRRSEKAVREVEKRHKESVERSKEEIRRLAEELRKSIEDSERRIKEIRER

SEQ ID NO: 16006 - protein, 56 aa, Artificial Sequence
  Synthetic
TDRLLEEHRKLVERILEELEKNLERHRRVVKEILDRVKELLDEHRRRVEEIERKIE

SEQ ID NO: 16007 - protein, 59 aa, Artificial Sequence
  Synthetic
SKEETLKRSSEESKKELKRVDEELEKIIREWEEDVKRSEKELEEVIERAKREAEKLRTR

SEQ ID NO: 16008 - protein, 56 aa, Artificial Sequence
  Synthetic
TDTLLERHKRLVEEVREKLERLLRRLRKVIKEDRERNKRLIKRLKEVIDEIRERVR

SEQ ID NO: 16009 - protein, 59 aa, Artificial Sequence
  Synthetic
SERERLEDSSRKSKERLERIARTLEKLLRDWRREVEKSEKRHRELVEKVRRDLDDLRRR

SEQ ID NO: 16010 - protein, 56 aa, Artificial Sequence
  Synthetic
TEKLLRDHKRLVDDLDRRAKELLEELKRVIDEDKKRNEKNLTDSRRLVEELKEEVR

SEQ ID NO: 16011 - protein, 59 aa, Artificial Sequence
  Synthetic
SSKERLEESSERSERSIERIDREHERSSEESERRLKKMVDDLRRSSEKSKDDLEKLKRE

SEQ ID NO: 16012 - protein, 56 aa, Artificial Sequence
  Synthetic
TDELVERHKRVVEEIEERAERNLRRHKKVVEDILREARKVLEDHKELVERLKERVE

SEQ ID NO: 16013 - protein, 59 aa, Artificial Sequence
  Synthetic
DAERRLKKSSEDSKRAIDELRKEHEDSSRESKERLDKIKRDHEELVRRARERAEELRRR

SEQ ID NO: 16014 - protein, 56 aa, Artificial Sequence
  Synthetic
AEKLVTDHKRVVETILDKARKNLDRHRRAVEDLLRKARENLKKTEELVRKLDEDVR

SEQ ID NO: 16015 - protein, 59 aa, Artificial Sequence
  Synthetic
DAERRLREILRRVTERLKEVKERHKRSSEKSKKSADDVRREHEKLAEELRRKVEELKRR

SEQ ID NO: 16016 - protein, 56 aa, Artificial Sequence
  Synthetic
TDTVIEELKRRIRELEKRLEENLRRHEELVRRIEEELKRNLKRSRDLLKEIEDKVR

SEQ ID NO: 16017 - protein, 59 aa, Artificial Sequence
  Synthetic
SEAEEVLRRLEELAKRDREENKKVLDDLEKLVREDEERNKEVLKDLEKFIDELDKELRS

SEQ ID NO: 16018 - protein, 59 aa, Artificial Sequence
  Synthetic
KDVVRELERLLREWERDNERSREEIDRVIEEARKRNEDSERELDRLIKEVKDRLDEKAR

SEQ ID NO: 16019 - protein, 59 aa, Artificial Sequence
  Synthetic
SDAEDVLRKLKELIDRDTKENDEVLRKHKRLTDEDRRKNEEVVRELRKIITRLDEKLRA

SEQ ID NO: 16020 - protein, 59 aa, Artificial Sequence
  Synthetic
KEVLDRIRDLLRRWRERNEESRRRAEKSIRDSDETNKRSREEIKRIIRKLREILKERKR

SEQ ID NO: 16021 - protein, 59 aa, Artificial Sequence
  Synthetic
SDVEKVLRELEELIDRDRRDVEKVIEELRKLIKEDEEENREVLKRAEKMLREIREKLRN

SEQ ID NO: 16022 - protein, 59 aa, Artificial Sequence
  Synthetic
EKFLRDIRETLKRWKERNEELTRRLREIIREVEERNEESKRRLDELIREAEEDMRRRRT

SEQ ID NO: 16023 - protein, 59 aa, Artificial Sequence
  Synthetic
SEAERVLEDLKRLIDEDRKKLREILEDHKRLTDEDRERNRRVLEELDKIIKELDERLRS

SEQ ID NO: 16024 - protein, 59 aa, Artificial Sequence
  Synthetic
KDVLDKIEKSLRDWERDNERMVKEADRSVKRSDETNEKSREDLERLIEEARRRLKERER

SEQ ID NO: 16025 - protein, 59 aa, Artificial Sequence
  Synthetic
SEVERVLEELEELARRDEEKNKRVEDRLRKLIEDDRRDLRRILERLREIAERLKEEAES

SEQ ID NO: 16026 - protein, 59 aa, Artificial Sequence
  Synthetic
EEFVRRIRDLLRRWKEEVDRSEDRIRRELEKWERENEEAEKRIRKIIEDLRREIKKKAD

SEQ ID NO: 16027 - protein, 59 aa, Artificial Sequence
  Synthetic
SKLERVLEELERLIREDEDENKKILDRLKKLIDEDKKENDEIMETLKEIARKLTEELRS

SEQ ID NO: 16028 - protein, 59 aa, Artificial Sequence
  Synthetic
EEVLRRIRELIKEVRRRNDESRERIERLLKEWRERVDASERTIREIIKEIKERVRRARK

SEQ ID NO: 16029 - protein, 59 aa, Artificial Sequence
  Synthetic
SKAEDVLRKLKELIDRDRDENRKVLDELRRLIERDREKNRRIMEKLKKIVRELEEALKV

SEQ ID NO: 16030 - protein, 59 aa, Artificial Sequence
  Synthetic
EDVLKRIEDELERWKEEVERSKREIEKLIKEARDENDKSRKTIEKIIREAEKILRDRDR

SEQ ID NO: 16031 - protein, 59 aa, Artificial Sequence
  Synthetic
SEAERVLEELKELIERDEEENRRILEEHKRLTEEDLRENREVMKRLEDIIRELEEKLRT

SEQ ID NO: 16032 - protein, 59 aa, Artificial Sequence
  Synthetic
EKVLTDIERLIREAEKRNRDSKREAEKSVKKSDELNERSRRRIEKIIEELRRLVDTRRT

SEQ ID NO: 16033 - protein, 60 aa, Artificial Sequence
  Synthetic
SDVEKFLDELRELIRRSKERVDRMLRKLEELIRRSSEDVERLLKELKELIDDIRRLLDEN

SEQ ID NO: 16034 - protein, 59 aa, Artificial Sequence
  Synthetic
DELRERIKRLLEEHHKRLREAVEELRKLVEDATEEHERLSERAKRLVEEVKKRVDERER

SEQ ID NO: 16035 - protein, 60 aa, Artificial Sequence
  Synthetic
DEVEKVLRDLEELIRRSETDIRRLLEELKKLIDDTRREVKKVLDDLRRRIKEVLDRIRRN

SEQ ID NO: 16036 - protein, 59 aa, Artificial Sequence
  Synthetic
DEARERLKDTVTKASRRHEKVERDLEKLLEEHHRAIEKLRKELRDLVRKAKEDIDRARK

SEQ ID NO: 16037 - protein, 60 aa, Artificial Sequence
  Synthetic
DEAEKVRREHRELVEDSLRKAEEALKRLDELIKRTEKRVKDVEEELKRLIKRVLDEVRKN

SEQ ID NO: 16038 - protein, 59 aa, Artificial Sequence
  Synthetic
DEVKRRLRTSDKKVSEKHKELLDRLRELLRRHHESLKRLEERIRKLVTDATRRIEEEEK

SEQ ID NO: 16039 - protein, 60 aa, Artificial Sequence
  Synthetic
DEVEELLKEHRELVKESKKTVEKMLRELEELIKRTRDEVEKVERTHEELVRRVDEVLKRR

SEQ ID NO: 16040 - protein, 59 aa, Artificial Sequence
  Synthetic
DELKERLKESDKEASDLHEKAREDLERLLKKHHDDLRKIMERLERSDKEAKKRLEEEKT

SEQ ID NO: 16041 - protein, 60 aa, Artificial Sequence
  Synthetic
DEVEKLLKELEDLRRKTREDLERVKKELEELVKRSKDRLREAEDELRRLVEDIERVIRED

SEQ ID NO: 16042 - protein, 59 aa, Artificial Sequence
  Synthetic
DELKKRIRELVKEHTDELRKVKRELEALVEKATEDHERVLRRLEELVERIKREVDKAEK

SEQ ID NO: 16043 - protein, 60 aa, Artificial Sequence
  Synthetic
SDAEDLLREHRELVERSKREVERVLDELRRLIEKSLREVEKVLKELEKLIREILDRVRKN

SEQ ID NO: 16044 - protein, 59 aa, Artificial Sequence
  Synthetic
DRVREELRRSDEKVSRDHEELVKEAERLVDEATKEHRKLKRRIRELVRRAKEEIEKLRK

SEQ ID NO: 16045 - protein, 60 aa, Artificial Sequence
  Synthetic
SKVEDILRRHRELVKKSLDEIRDLLRKLKRLIEESLRRVEEVLRDHERLVREIEDRVRKN

SEQ ID NO: 16046 - protein, 59 aa, Artificial Sequence
  Synthetic
DELKRRLRESDKRVSERHKRATEEIKKLLDRATEEHKKLVKRLRDSDKRVADELDKAEK

SEQ ID NO: 16047 - protein, 60 aa, Artificial Sequence
  Synthetic
DDVDRVRKEHEKLVRDSLDTARKLLEELEDLIRRDKEDVERVLEELKRLIEEIDDRVRRN

SEQ ID NO: 16048 - protein, 59 aa, Artificial Sequence
  Synthetic
DELIERLRRSDKRASEEHKRLMDEAKRLVEKAEKDVTELNKDIKRLVKEVEDRLREAER

SEQ ID NO: 16049 - protein, 60 aa, Artificial Sequence
  Synthetic
DEVKKVLDESRELVDRIRRKAKEVDDRDRKLIRDVLEELKKLLEENRKLVEDIRRLLEAG

SEQ ID NO: 16050 - protein, 56 aa, Artificial Sequence
  Synthetic
KETLRRLHEETERILRDLKRHNDELNDEARKRLKEVKERLDESHDRVRRELEAKER

SEQ ID NO: 16051 - protein, 57 aa, Artificial Sequence
  Synthetic
KDVEEILRKLKELIDEARRRLEKTLRDHEDIVRRAKRRLEELLKRHRDIMDEVRRKV

SEQ ID NO: 16052 - protein, 59 aa, Artificial Sequence
  Synthetic
EEARRRLEEEVRKVRKEIEDVNRRLEKSHKEAEETLRRVEEELKKSHDELERILREIER

SEQ ID NO: 16053 - protein, 57 aa, Artificial Sequence
  Synthetic
DDVEEILRTLRELIKKIKKDLKKVLDDHERIARRAKEELERILRRHREIVERVDRKV

SEQ ID NO: 16054 - protein, 59 aa, Artificial Sequence
  Synthetic
DEARKKIEDIVREVEDDLRRVAKAAEDSNRKLEKDLREVAERLRKSHEEAEKALRDREK

SEQ ID NO: 16055 - protein, 57 aa, Artificial Sequence
  Synthetic
DDVRRLEEELRRLMEEAERRLRKTLEDHKRIVEEAKRRLEEILREHKRILEEIDKRV

SEQ ID NO: 16056 - protein, 59 aa, Artificial Sequence
  Synthetic
EELKKRVEDLVREIRRRLDKVNEDLERSNRELEKVLRDVLRELKKSHDDLERSLRETRR

SEQ ID NO: 16057 - protein, 57 aa, Artificial Sequence
  Synthetic
DEAEKILDELRRLIDEIRRRLRKTLEEHKRILERIRRELEKMLEEHRRIVDEMRRKL

SEQ ID NO: 16058 - protein, 59 aa, Artificial Sequence
  Synthetic
EEVTRRLEKLVRDVDRDIKRVNKELEKSNRELEKDLRAVEKRLEDSNRDARKKLEDTRR

SEQ ID NO: 16059 - protein, 57 aa, Artificial Sequence
  Synthetic
DDAERILEELKRLMEEVEKRLKDTLDTHREIARRILERARESLKRHEDIAREIERDV

SEQ ID NO: 16060 - protein, 59 aa, Artificial Sequence
  Synthetic
EDVKRKIRELVERAKKRLKEINDELKKSDEDLDRKLEDLNRRLEESNEELKRRLDETRR

SEQ ID NO: 16061 - protein, 57 aa, Artificial Sequence
  Synthetic
SDAEKLLEDIRKLTEDVERDLRRSLEELKDLIRRLKKEIEDLLERHKRIVDKVVREV

SEQ ID NO: 16062 - protein, 59 aa, Artificial Sequence
  Synthetic
EEVKERVERLVREVEKRLDEVDKELEEEVDKARKELEKLLEDIDRSDKEARKRLEDKRR

SEQ ID NO: 16063 - protein, 60 aa, Artificial Sequence
  Synthetic
SKEDEIRRLIEDLERRNKEVEETLRELVRETRERIERIKRRLEELIKKSKDEVDDARRKG

SEQ ID NO: 16064 - protein, 55 aa, Artificial Sequence
  Synthetic
EELLERLERLIDKSRKNVEDIVKRHEDLSRELTERAKAILERHKELTDELREDVR

SEQ ID NO: 16065 - protein, 59 aa, Artificial Sequence
  Synthetic
SEEERIERLIDELRRDNDEVRKRLDKLVKDTERENEEAERRLRRLIEESRREVEKLKAE

SEQ ID NO: 16066 - protein, 55 aa, Artificial Sequence
  Synthetic
EELARELEKLIEDSRRNVKRIKEEHEELSRRNRKLLEDILERHRRLTEELRKKVK

SEQ ID NO: 16067 - protein, 60 aa, Artificial Sequence
  Synthetic
SKEREIEELIKELEEEVERLKEELRRIIKKLRDDNKRAEEELERLIRESKEDLDRARKEG

SEQ ID NO: 16068 - protein, 55 aa, Artificial Sequence
  Synthetic
EELRKELEDVRRKLKEEIDRILEEAKRVVDDSRRNAEEITRRHKEATKRLREEVE

SEQ ID NO: 16069 - protein, 60 aa, Artificial Sequence
  Synthetic
SIAERLKELIDRMREDNERAAKELRELIRKAKEESKEVEERLRRRLKELRDRVEELVRRN

SEQ ID NO: 16070 - protein, 59 aa, Artificial Sequence
  Synthetic
KEMLDRILEELKKLIKESRENLRRILEDLKRLLDESRRHAERITRRLEELIKELKEKAD

SEQ ID NO: 16071 - protein, 60 aa, Artificial Sequence
  Synthetic
KARERLKRLIEEAKRRNEEMEKELDRRLDELRRESKTLEEDLRRSLEELEERIRRLVKRN

SEQ ID NO: 16072 - protein, 59 aa, Artificial Sequence
  Synthetic
REMVEEILRELRKLVEDSLEVLERILDDLRRLIEESRKHLEEVKRRLEELKKRLEDEAR

SEQ ID NO: 16073 - protein, 60 aa, Artificial Sequence
  Synthetic
KEVEKILEEIERLIREIDREVKRVKTENEKTVRDIRKRVEEIKEEHKDLTRKLEKLARDG

SEQ ID NO: 16074 - protein, 59 aa, Artificial Sequence
  Synthetic
DEARKRAEDLLRDAKRRVDEVVEELKKTVEELKEEVRKVEEELKELVKRSEDKVRETER

SEQ ID NO: 16075 - protein, 61 aa, Artificial Sequence
  Synthetic
SEVDKVLKEHEDLVREDKKRLEEILRELKDRLRRDEEELRRIMEELEELLRRLKDVVDKRR

SEQ ID NO: 16076 - protein, 59 aa, Artificial Sequence
  Synthetic
KEMIDRLRRSDEELKKEADRANEEAKRIVEKIRDTLKKANDKLDEIVERIEDELRRAET

SEQ ID NO: 16077 - protein, 60 aa, Artificial Sequence
  Synthetic
KEAEDVEEEHKRLVEDDRRKLEEIKKTLERLVEEDRRRLEEVVRELKRLLDEITDVLTKR

SEQ ID NO: 16078 - protein, 59 aa, Artificial Sequence
  Synthetic
DEVRKRLRKSDKELRDEAREVNKELEAIVKRARDEVKKVNDDLRKIVDEVRETVKEARR

SEQ ID NO: 16079 - protein, 60 aa, Artificial Sequence
  Synthetic
DEVREVKKRLRDLIRDDERELRRVLEELKELVKDDVDKLRRLIEKLRKLLEELRRVATKR

SEQ ID NO: 16080 - protein, 59 aa, Artificial Sequence
  Synthetic
EKAREELKRIVEEVEEKSRRANKKLKDIVDEMRERVKRANEELDDIVKKITEDLERMRK

SEQ ID NO: 16081 - protein, 60 aa, Artificial Sequence
  Synthetic
REVDEVRKEHERLVKEDEDKLRKIIEDLKKLLREDEKRLREALKRHRELVEEARDVVRKR

SEQ ID NO: 16082 - protein, 59 aa, Artificial Sequence
  Synthetic
DKVKKELEESDRRVEEKSRRANETLKRIVEEIRKKAEEINRRLKESDDRAAEDIKRVEK

SEQ ID NO: 16083 - protein, 60 aa, Artificial Sequence
  Synthetic
DEARRVKEELDKLRREDEELLRRLMEKLKDLIRRDTEELKRIIDELRELVERLEDELRRR

SEQ ID NO: 16084 - protein, 59 aa, Artificial Sequence
  Synthetic
EKVREELRRIVDRVKKEVDRANRELEDIRREVEEISKRANEELERIVTEAADRLRKVAE

SEQ ID NO: 16085 - protein, 60 aa, Artificial Sequence
  Synthetic
SEAEKVIREHERLLEEDRRRLEEALRTLERLAERDEERLKEAEERHRDLLRKLEETVKKR

SEQ ID NO: 16086 - protein, 59 aa, Artificial Sequence
  Synthetic
DEVKRRLRKSDEDVKRRAEEINKEAKEIVDDVKKKSDEANKRLKDSDKRVAERLKEAED

SEQ ID NO: 16087 - protein, 61 aa, Artificial Sequence
  Synthetic
SEVEKVIEDHDRLLKRDEELLRKIAEDLKDLVRRDEERLRRATEKLKRLLETLEDVLRKRR

SEQ ID NO: 16088 - protein, 59 aa, Artificial Sequence
  Synthetic
KEVKDKLRRSDERVEKRSRDANRELEEIVRRARKKSEEANRRLEEIVERAEKRLKEAED

SEQ ID NO: 16089 - protein, 59 aa, Artificial Sequence
  Synthetic
SEVDKVVEESKTSMRRLERRHREATKESKKSIEEIEETVERVKRESEKSVKKLDDLVKN

SEQ ID NO: 16090 - protein, 59 aa, Artificial Sequence
  Synthetic
EEVRRRLRKIHKELEERLRRMNKRLRELHRELEEKVKEVKKELEDIHRKARERVEKAKE

SEQ ID NO: 16091 - protein, 59 aa, Artificial Sequence
  Synthetic
EELKEVRERSKESIKRIKEEHERVEEELKDIKRDIDRRHKEVVDESRESVKRVEDLSRA

SEQ ID NO: 16092 - protein, 59 aa, Artificial Sequence
  Synthetic
EEVRRELREIHDELRKRVEEANKRLEDILREIDKRLKELNEELKRIHDRARERLEEERR

SEQ ID NO: 16093 - protein, 59 aa, Artificial Sequence
  Synthetic
DEIREVIKESKKSVEDVKRRHEEAKRESERSLKEIRELAEEVKERLRDLLRRIRKLVKD

SEQ ID NO: 16094 - protein, 59 aa, Artificial Sequence
  Synthetic
EEVRRRLRKIHKEAEERLRRANDELRKLHEEIKKTVEKIKRELDKIVEEIERDVRRDRK

SEQ ID NO: 16095 - protein, 59 aa, Artificial Sequence
  Synthetic
SRVEEILRDSKRSMDEARKEHERVLRELRDRLRRLDERHRRLLEELKRLLREVRELTRA

SEQ ID NO: 16096 - protein, 59 aa, Artificial Sequence
  Synthetic
EEVLRRLDDIHRRIKRELKEVNDRLEEIVREIRKRLKEVNERLKEIVDAVEEVVRRAEK

SEQ ID NO: 16097 - protein, 59 aa, Artificial Sequence
  Synthetic
KRLEDVARESKKSIDEIRKRHKEATDESNKSIEEARRIHEEVLRTLKELLDRVRKLIES

SEQ ID NO: 16098 - protein, 59 aa, Artificial Sequence
  Synthetic
EEVRRDLRRIHERLREEAEEVNERLERNHEELEREARKVNEELRKIVEDARREVERAKD

SEQ ID NO: 16099 - protein, 59 aa, Artificial Sequence
  Synthetic
DDVEEIKRRLEELLERLKEDHKRMLEESRKSVEDAEKIVEEVKKESEDSIREIKKLLKD

SEQ ID NO: 16100 - protein, 59 aa, Artificial Sequence
  Synthetic
EKVKRELDEIVKRIEDEARKVNEELKRIHDDAERKVRKVKEDLERIHRELKKRVEDDRT

SEQ ID NO: 16101 - protein, 59 aa, Artificial Sequence
  Synthetic
KEDERVEEELRKLLKELEDRHKKASEDSRDSIRRIRERARTVLEELKRVLEDIDRLIKA

SEQ ID NO: 16102 - protein, 59 aa, Artificial Sequence
  Synthetic
EEVKRRLDKIVDDVRERLKEMNDRLRRLHEELKRELERIKEELDKILEEVKRRLEEARR

SEQ ID NO: 16103 - protein, 57 aa, Artificial Sequence
  Synthetic
ELEERLTRSNDELRKELKRMNEELRRKLEEIRKELERLNEKLREIIERIKEDLDRRA

SEQ ID NO: 16104 - protein, 59 aa, Artificial Sequence
  Synthetic
RELAEEFLRRHKELVERIREIHERLRERLEELLRRIEELHKRLEDELREVLKRIEDEIR

SEQ ID NO: 16105 - protein, 57 aa, Artificial Sequence
  Synthetic
KKEEDLDESNKRARDELKEMNDRLRKIVKEIEDELRRLNEEARRSNEELRRRVEERL

SEQ ID NO: 16106 - protein, 59 aa, Artificial Sequence
  Synthetic
DELAKKVIKEHEDLVREVLKRHEDLLRRARELLKKIKEIHDRLLDEHRKLVEDIEREAT

SEQ ID NO: 16107 - protein, 57 aa, Artificial Sequence
  Synthetic
DRERELEKSNRELERELREALKRVKEIIDRIRKTLEDMNRRLKRSNEEAERRLREKA

SEQ ID NO: 16108 - protein, 59 aa, Artificial Sequence
  Synthetic
DELAERVIREHRRLAEEIRRLIEKLKREIEELLERARRTHEDLLRKHKELVKKVDEEIR

SEQ ID NO: 16109 - protein, 57 aa, Artificial Sequence
  Synthetic
DDEEEVKRSNDELRKEIKEAEERLEKSNRELEEDLRRMNRELEESNKRLRELLEREA

SEQ ID NO: 16110 - protein, 59 aa, Artificial Sequence
  Synthetic
KELAEDMLRRHRDLVREIRELIDKLTRDHDRLVKEAREIHKRLTERHRKLVEDIKRETD

SEQ ID NO: 16111 - protein, 57 aa, Artificial Sequence
  Synthetic
SKEEELEKSNRKLKEDLERMNEDLKRILREVEDVLRRIEEELEKLVRELEEILKRRV

SEQ ID NO: 16112 - protein, 59 aa, Artificial Sequence
  Synthetic
DELAEEVIDRHRDLVRRIKDEHRKLTDELRKLLEDIERLAEEAKRKLEKLIEDVEREAN

SEQ ID NO: 16113 - protein, 57 aa, Artificial Sequence
  Synthetic
SSEERVKKVVEELEDLIRKIREEHKDSIRENRKVVEDIRERVKELITELKKELEDKL

SEQ ID NO: 16114 - protein, 56 aa, Artificial Sequence
  Synthetic
TEDLLRRLRKLIEDVFREARENLKRHKKMSKEAKEKLEELLKRLRDLIKEAREKIK

SEQ ID NO: 16115 - protein, 59 aa, Artificial Sequence
  Synthetic
SEADEVLRTHEELVRELEERAKEILRRHRKLSEESERKAREVLKTLRDLIRELKKLADE

SEQ ID NO: 16116 - protein, 59 aa, Artificial Sequence
  Synthetic
EEIARRIEESEDKSRRIIDEVRERVRKSIEENKRVVEEVRERVERLIKELDKIVEDIRR

SEQ ID NO: 16117 - protein, 60 aa, Artificial Sequence
  Synthetic
DELEKVIEELKRRIEEVKKELTELNKELKDVSKEIEDVIRDLNRELKKLSDRIKELADRD

SEQ ID NO: 16118 - protein, 59 aa, Artificial Sequence
  Synthetic
EEIRRRLDEVLRKAEEDLRRAEESNDEHLRKSKEDVERARKSNDKHLDDNRKTLEEATR

SEQ ID NO: 16119 - protein, 60 aa, Artificial Sequence
  Synthetic
SDVEDLLRRLRKLTKDIEERVKELNKKLEDVSRDIKRRVEEVLKKLEDVLRKARDEVRKL

SEQ ID NO: 16120 - protein, 59 aa, Artificial Sequence
  Synthetic
DRAEKELRKILEDHKEISDRVRRSNEKLLRDHRRTSETVKRRLEKVLEDIRKELEDAKR

SEQ ID NO: 16121 - protein, 61 aa, Artificial Sequence
  Synthetic
DVEERVKTIVDDIERTLDEVRRRLEESHKRLEDALKEVDDRLKKLLKETEEVLKRIEDERG

SEQ ID NO: 16122 - protein, 59 aa, Artificial Sequence
  Synthetic
KEKVEELLRRLREILERVTRRLEEVLKRHRDLVEEVKKELERVLEDHKRLSEDAERRAR

SEQ ID NO: 16123 - protein, 60 aa, Artificial Sequence
  Synthetic
SVEEALEKSVKESEEVLKKAEKELRESHEDAKRVLKEVRDELERLMEETKKELRDVERKR

SEQ ID NO: 16124 - protein, 59 aa, Artificial Sequence
  Synthetic
KEKVDRILKKDKDLIDRVRRELKKMLDRHRKLVEDVKRELEEALKEHKDDSKRVRDKLK

SEQ ID NO: 16125 - protein, 60 aa, Artificial Sequence
  Synthetic
DIEDRLERVVRDAKRVLADVEDKLRKLLEETERMLRRVKRELERSHEEAEEELRRVEEER

SEQ ID NO: 16126 - protein, 59 aa, Artificial Sequence
  Synthetic
KKLLEDILRKLRKIIEEVKRTLEEALKRHRDLTRKVVEELEDLLRKHRRIVEEVKKRLK

SEQ ID NO: 16127 - protein, 60 aa, Artificial Sequence
  Synthetic
DIEDELRKSVKRSEEVLREVEERLKRLLEETKEVLTRARETNEKSHRELEDKLRKIEEER

SEQ ID NO: 16128 - protein, 59 aa, Artificial Sequence
  Synthetic
ESKLRELLKRDKKEIDDVKRELERLLEDHKRLTEEIRRRLKRLNEKHREIVKRVEKELK

SEQ ID NO: 16129 - protein, 60 aa, Artificial Sequence
  Synthetic
DVEDRLRESEKRSEKTLKDVEERLRRSHEDLEKKLREVEKRLRDSHREAEKTLKRVKEEK

SEQ ID NO: 16130 - protein, 59 aa, Artificial Sequence
  Synthetic
KEVVRKILEDDKRLIEEVKKELERVLEEHRRLVEKVKRELEEVLKRHKEIVDDVRRRLE

SEQ ID NO: 16131 - protein, 60 aa, Artificial Sequence
  Synthetic
SIEDELRKIADEARKVLDKVRKDVERSHREAEKKLREIDKRLKDSARDSKRVLDEVREER

SEQ ID NO: 16132 - protein, 59 aa, Artificial Sequence
  Synthetic
EEKLERILRKLKKIIKDVEDELRKLLEEHRELVKKVEKDLRDLLERDRELIEEVERRLR

SEQ ID NO: 16133 - protein, 60 aa, Artificial Sequence
  Synthetic
DIEDRLRTSVKKSRDVLEEVERKLRDSHRRAKEVLDKAREDLRKSKEDSKRVLDDVRRKR

SEQ ID NO: 16134 - protein, 59 aa, Artificial Sequence
  Synthetic
KEKLEDVLRRDEELIDRVRRRLERILEEHEELVKRVEEELRRVLEEDRKLIKRVKEELE

SEQ ID NO: 16135 - protein, 60 aa, Artificial Sequence
  Synthetic
DIEDALRDSERESEEVLKRAREELEKSHKEVKKRLDEVEKTNKDSVDESKKVLDDVRRKR

SEQ ID NO: 16136 - protein, 59 aa, Artificial Sequence
  Synthetic
KELLKKILKEDKELIKRVEEILRRILEEHRELVRRMKKELDELNKRDKELIDRVREELT

SEQ ID NO: 16137 - protein, 60 aa, Artificial Sequence
  Synthetic
DLEEEAKKSVRESERALDEVRKRLDRVRKEVERELRKVEEDLRRSHRKLEDILRRVAEKR

SEQ ID NO: 16138 - protein, 59 aa, Artificial Sequence
  Synthetic
EEAARRILERDKALIEKAREDLKRILDEAREILKEAAKRLEDILRKHKKIVEDVARELE

SEQ ID NO: 16139 - protein, 60 aa, Artificial Sequence
  Synthetic
KIEEEVEKLIRDARRIIEEMRESTERLIERNEEVLETVRREVEKLLRDLERILEKIKREL

SEQ ID NO: 16140 - protein, 59 aa, Artificial Sequence
  Synthetic
EEVLRRILEEIRKIVEDVRRELDTLNRELEELTKESRRRAEELLRRLKEIVKKVERDAE

SEQ ID NO: 16141 - protein, 59 aa, Artificial Sequence
  Synthetic
REVEEILKEVETLIRENKKKLEEWLRTHEKLNEDLERKAREILTRHRRENEDLKRVADD

SEQ ID NO: 16142 - protein, 59 aa, Artificial Sequence
  Synthetic
DEVKRRIEELIKKSKRVNDEANRRVDKLVKDTRDKIREIEERIRKLIEESKKLLEDKRR

SEQ ID NO: 16143 - protein, 59 aa, Artificial Sequence
  Synthetic
REVEEILRRVRELIERNRKEVEDWMRRHRRVNEELKRKAREILERIKEMLKTLKEVLER

SEQ ID NO: 16144 - protein, 59 aa, Artificial Sequence
  Synthetic
DEAAKRIEKLIKESRERNEEVNRKIKKLIEDTRRVVEDVRRKVEELVKRLRTELDRARK

SEQ ID NO: 16145 - protein, 59 aa, Artificial Sequence
  Synthetic
SEAEEIAKRAKEAIERNRKLAEEWAKRARDAAERLKELYKRIAERHRKANEELRRAAER

SEQ ID NO: 16146 - protein, 59 aa, Artificial Sequence
  Synthetic
DEARKRIRELIERSKKANKEANDRARKLAEDAKRLNEEANERAKRLAEESREAIKEAER

SEQ ID NO: 16147 - protein, 61 aa, Artificial Sequence
  Synthetic
REVEEVAKELRELIKRTEDLIRRALERNRKLVKETRDLIEKVLRDLRDLLRRLEEEARRRG

SEQ ID NO: 16148 - protein, 56 aa, Artificial Sequence
  Synthetic
DKTLRDLLREHKELVEEAKRRLEESNDEHRREVEDAERRIEEIVRDAKRVVDEIER

SEQ ID NO: 16149 - protein, 61 aa, Artificial Sequence
  Synthetic
SEVEKVVTELRRLIERLEEVIRRALDTNRKLLEDTEKEAERMMRKLEELIKDLERDLREKG

SEQ ID NO: 16150 - protein, 56 aa, Artificial Sequence
  Synthetic
KETLRKLLKELREVLDKAREDLERSNRDHRRAVEEIKERLERLLKKLEDVVRKAKE

SEQ ID NO: 16151 - protein, 61 aa, Artificial Sequence
  Synthetic
KEAEEAAKKLKDLIKEDRERARRALEENKRLIDELRKAAKEALDRNRELLERLRDEARKRG

SEQ ID NO: 16152 - protein, 56 aa, Artificial Sequence
  Synthetic
KDTAEDLLRRATRDSEEAKKKLKKSNEEAAKAVEEAKERLKRSVDEATKAVEEAKR

SEQ ID NO: 16153 - protein, 59 aa, Artificial Sequence
  Synthetic
SEVEKALEESKESLKTIKKIAKDVLTESEESLRRTKKLIEEVLEASKRSIEELKRLSEA

SEQ ID NO: 16154 - protein, 56 aa, Artificial Sequence
  Synthetic
EDELRRLHEDVKRLVEEIAKRLDELHDRHRETVKRAKEELDKLHDRARKEVEDDKR

SEQ ID NO: 16155 - protein, 59 aa, Artificial Sequence
  Synthetic
SEVEKVLKDSEKSIEDAERIARDVLRKSEESIDRIRRIAEEVLKESEKSIRDAKKLAED

SEQ ID NO: 16156 - protein, 56 aa, Artificial Sequence
  Synthetic
ERELDRLHEKLRRVVEEIEKELRESNRKLEEVLRDIKRKLDDLHRKAREILERIRK

SEQ ID NO: 16157 - protein, 60 aa, Artificial Sequence
  Synthetic
SEVEEVLKRIRDVIKTMEDRAREVLKESEKSIKEIRDTIREVLKRSEDSIRRIDEELKKG

SEQ ID NO: 16158 - protein, 56 aa, Artificial Sequence
  Synthetic
KDRLDELLKRAEEVLRKIKEDLRRSNEKLREEVKEAKKRLDDLHRELEDVLREAKR

SEQ ID NO: 16159 - protein, 60 aa, Artificial Sequence
  Synthetic
KETEEAEKLAREAARRSEKLAEEAEKRAKEAIDESKELADRARDTARRADEDLERLAREG

SEQ ID NO: 16160 - protein, 56 aa, Artificial Sequence
  Synthetic
REKLDDLLRRHNEKVKRAKERLDRLLEEHEKRIRDAERDLERLERELKKKAEDKRR

SEQ ID NO: 16161 - protein, 60 aa, Artificial Sequence
  Synthetic
SETEEALERLRKMIEDSRRLAKKIREDLREMIERSRRLAEKVRRDDEKSSEDLRRVTEEG

SEQ ID NO: 16162 - protein, 56 aa, Artificial Sequence
  Synthetic
KDRLDRLLEEHNRIVKEIKEDLDRLLREHNEIVKRIKDDLDRLHEENRRLLEESER

SEQ ID NO: 16163 - protein, 59 aa, Artificial Sequence
  Synthetic
SKEDLVRELKKKLEEVVKRSREESERSLRKLEKVIRDFRRESERLKKESRDVVKKARED

SEQ ID NO: 16164 - protein, 55 aa, Artificial Sequence
  Synthetic
EEVLKEIDDLIRRDEERLRRVLRESEELIKEIKKRAEEMLTRSKKLTRDIEEKTR

SEQ ID NO: 16165 - protein, 59 aa, Artificial Sequence
  Synthetic
RDREELRRLEEELRRVFEESRRRSERSKKELDKIVKEAEKASKRSLDKLKRVFDELRRR

SEQ ID NO: 16166 - protein, 55 aa, Artificial Sequence
  Synthetic
EDVLRDARELIERDREELERVLRDSDRLVREIKKRIEEMLKRSEDLIEEIERRAR

SEQ ID NO: 16167 - protein, 61 aa, Artificial Sequence
  Synthetic
SEVERVLKEIEDLIEEIERRAKTVLEEIDKLTKEIEEVVKRMLDRDRELIKTAEDLLRKNK

SEQ ID NO: 16168 - protein, 58 aa, Artificial Sequence
  Synthetic
RVRKALEDLLRKVEEVVRRVREELKKLERKDREVVRKVEEDSERSLRELEKVADEARK

SEQ ID NO: 16169 - protein, 60 aa, Artificial Sequence
  Synthetic
SEVEKVLRELKELTRRIREEAERLLREDERLLREAERIARELLETNKRLIEEIERRLRER

SEQ ID NO: 16170 - protein, 58 aa, Artificial Sequence
  Synthetic
RVKKDLEEVRKRDREVVEEVRRRSEKSKEDVRRLVEKIRKDSEDSLKELKEVVEEARR

SEQ ID NO: 16171 - protein, 60 aa, Artificial Sequence
  Synthetic
DEVEKMLEELKRLTDKIREDAERLLKRSEELTEEIKRLIDELLKEIEELIKEARDIVRRN

SEQ ID NO: 16172 - protein, 59 aa, Artificial Sequence
  Synthetic
ERVRRELEKVEREDRKVVRDAEEELKKSRKKSEDVVKEAKERLEELLRRVKRVVDEVRR

SEQ ID NO: 16173 - protein, 60 aa, Artificial Sequence
  Synthetic
SEVERVLKEIEELTRRLREEAEELLERSERLTEKIRRRAEELLKRNEDLIEKIERDLRRN

SEQ ID NO: 16174 - protein, 59 aa, Artificial Sequence
  Synthetic
DRVKKALDELRRRDREVVKRLEEELEKSKKKSEDVVREVEEKSERSKRKLERVADEARR

SEQ ID NO: 16175 - protein, 57 aa, Artificial Sequence
  Synthetic
SEAEKLLKEDEDLIRKARDEIRKVLEDDERLIEEVERKSREMLKRIKEIIDDMRKRI

SEQ ID NO: 16176 - protein, 59 aa, Artificial Sequence
  Synthetic
KEVVEEVRKSRKKSEDVLREVERELKKSFEKSKRVNDDSKKKLDELKREADEVIKRLKD

SEQ ID NO: 16177 - protein, 57 aa, Artificial Sequence
  Synthetic
SRAEELLKRDEELIDTVRRRIEKMLREIKEIIDRVKRKSEKMLEDDERLIREVEKRV

SEQ ID NO: 16178 - protein, 59 aa, Artificial Sequence
  Synthetic
EEVLRELEKSRKKSEEVLERVKRELEKLERRAEEVNKESEDRLRESEKESKKVIDELRR

SEQ ID NO: 16179 - protein, 57 aa, Artificial Sequence
  Synthetic
RRAEELLRTIKEIIKRIDDELKRVLDDDDRLIDELRKESERLLEEIERIIRRIEREV

SEQ ID NO: 16180 - protein, 59 aa, Artificial Sequence
  Synthetic
EEVLRELRKLEEEAKAVIDKARRELERSERKSEELNRESKRRLEELSRRAKRVIDELRK

SEQ ID NO: 16181 - protein, 57 aa, Artificial Sequence
  Synthetic
DEVRRLLKEIEDIIRRIEEDIRRMLEKDRKLIEEVERKSKEMLDRDKRLIEELEKRL

SEQ ID NO: 16182 - protein, 59 aa, Artificial Sequence
  Synthetic
EEAVRELDRLRREAEEVLDRVRKKLDKSRKDSERVNEESERRLERSAEESKRVLDELRR

SEQ ID NO: 16183 - protein, 60 aa, Artificial Sequence
  Synthetic
DVREELKKVVDKAEKVSRKSRDDLDKVRKRVEEVNRDNERRLREIAKKVKEVLRDIDRKR

SEQ ID NO: 16184 - protein, 59 aa, Artificial Sequence
  Synthetic
KEVVKRLLEDVDRLIREVEKESKRLLDEIEEMIEELKRRAEENLKTIEDIIKDVTEKAT

SEQ ID NO: 16185 - protein, 59 aa, Artificial Sequence
  Synthetic
REVEEVLKTVRKLIEELERSSRKSLKEVKELLEKLEEDARRSLKRVKELLKELEDRSRT

SEQ ID NO: 16186 - protein, 59 aa, Artificial Sequence
  Synthetic
EEAKKRIEDLIRELEELLRESSDRHRKLDEELKKLLKDVTDAHRRLMEELRKLLEDIET

SEQ ID NO: 16187 - protein, 59 aa, Artificial Sequence
  Synthetic
DEVETILRDIKRLLREIEELARKSSKKFKELLERLEETARRSLTRIERLLEEVEDISRT

SEQ ID NO: 16188 - protein, 59 aa, Artificial Sequence
  Synthetic
EDAAREIEKLKRELERLLEEASRTHEELTRRLEKLLEDATREHERLKRELEKLLEDIKK

SEQ ID NO: 16189 - protein, 59 aa, Artificial Sequence
  Synthetic
REVEEILRKIRELLEELRKRVEESRRRIEELLKKLEEEVRESEKDVRRLLRELEEISRT

SEQ ID NO: 16190 - protein, 59 aa, Artificial Sequence
  Synthetic
EEAAKEIEKLVKELEELLKRASDKHRKLSKDLEDLLREVTERHRRLEKELEDLLREIER

SEQ ID NO: 16191 - protein, 59 aa, Artificial Sequence
  Synthetic
SEVEKLLEEARRLLKELEDSSRRSVEEAKRLLEELKRRVEESVRRIRELLKDLERLSSR

SEQ ID NO: 16192 - protein, 59 aa, Artificial Sequence
  Synthetic
ERAKEALRELEKRLRDLLRDSSRLHEDLARDLKRLLDEVTEEHDKLRRELRKLLEDIKT

SEQ ID NO: 16193 - protein, 59 aa, Artificial Sequence
  Synthetic
SEVEKVEEDVKRLLKEIEDSSRRSLEKAKRLLEELRRSSEESLKRIRDLLEELRELSRT

SEQ ID NO: 16194 - protein, 59 aa, Artificial Sequence
  Synthetic
EEAKKRIEELKRELEELLKKSSEEHKKLVKELKELLKKSTEDHEKLKRDLRKLLEEIRT

SEQ ID NO: 16195 - protein, 60 aa, Artificial Sequence
  Synthetic
DSEDLMRRVKEELDKLVKDSRKRSEDLKRENEELLRRSEEALEKSVRDADRLFEEIKRTK

SEQ ID NO: 16196 - protein, 55 aa, Artificial Sequence
  Synthetic
RDVLKTLKDLIRELKRHSEEVEREDKETTDRLRRHSEKALRTNEEIIRRIEERAR

SEQ ID NO: 16197 - protein, 60 aa, Artificial Sequence
  Synthetic
SVDEALRDIERKVEELMRESDERLRRVKKEVEDNVRRSEEELKRIADEMKELLDRARERG

SEQ ID NO: 16198 - protein, 59 aa, Artificial Sequence
  Synthetic
EDLVREVLKKLKELIDRWRDLSRRLKERLDTLIKEHHELSKRLLERLKRLIDEARKKLN

SEQ ID NO: 16199 - protein, 59 aa, Artificial Sequence
  Synthetic
SEVEELKREADDVNRRAEELARETLKKIEKVNREVKRRLEEALREIEELLRRAEEIVRR

SEQ ID NO: 16200 - protein, 59 aa, Artificial Sequence
  Synthetic
EEARKRLEEVVRHNKKLDDEHRKALDELRKHNEDLDRRSKEELDKLRKRLEDLLRKVKE

SEQ ID NO: 16201 - protein, 59 aa, Artificial Sequence
  Synthetic
REVEELLKEIEEVLKKSERLSRESLKKIREVLERIERLARENVKRMKEVIDRVRELAER

SEQ ID NO: 16202 - protein, 59 aa, Artificial Sequence
  Synthetic
EDARRALEELRKRVEEVNKKSRDDLERLTREAEELNRKNEEDLRRLEKEVKDLLDEIRR

SEQ ID NO: 16203 - protein, 60 aa, Artificial Sequence
  Synthetic
SSRETVKRLTEEARKLLEDWKDRNRDVERKVEEIIERIRRTNEKSERDARRKLEEVDKRR

SEQ ID NO: 16204 - protein, 56 aa, Artificial Sequence
  Synthetic
TEELKREIERILEELRRLMKEDKEELERILERLRRLAEEDKKENEEILDRVDKKAK

SEQ ID NO: 16205 - protein, 60 aa, Artificial Sequence
  Synthetic
STEETITDLKREAEEILRRWREENKRVSDEAAESVKESDKTNKKSKDDLKRVLDEVDTKE

SEQ ID NO: 16206 - protein, 56 aa, Artificial Sequence
  Synthetic
AKELEDEVREALKRIRKLIEEDRRKLKRILDEHRRLTEEDRERNERVLRELREDTR

SEQ ID NO: 16207 - protein, 60 aa, Artificial Sequence
  Synthetic
SVDESLEEIRKEVERLLRKWKEDNKEMRKRIRELLEDWRKKVEDSKKRAKDLIDEVKKRR

SEQ ID NO: 16208 - protein, 56 aa, Artificial Sequence
  Synthetic
TRELEKEAEDALRRLKKLIEEDRRELEKILKELEDLMREDTKENEKILREAEERSR

SEQ ID NO: 16209 - protein, 60 aa, Artificial Sequence
  Synthetic
SVEDEIRRLTEEIERTLRRWREEVKRSEDRAEESIKRSDEKNKESKERLDKVLDEARRRR

SEQ ID NO: 16210 - protein, 56 aa, Artificial Sequence
  Synthetic
LRELLKEVEDVLEELKELIKRDTEENKRILDEHKRLTEEDEKRNREVLERLKRKTD

SEQ ID NO: 16211 - protein, 60 aa, Artificial Sequence
  Synthetic
ESEETLKEVKKEIEKLIKRAEEINRESAERLKRILEEWKKEVDRSEKRLREVLDEVRRRR

SEQ ID NO: 16212 - protein, 56 aa, Artificial Sequence
  Synthetic
RRELLEELKRVLDRLKKLIDDDRRKNEKVLRDLEKLMREDADENREVLKRLEDKAR

SEQ ID NO: 16213 - protein, 60 aa, Artificial Sequence
  Synthetic
SDEERVIKEVEDLIRRIREDNKRLLDEAEKIIRRVAEDNKKLVEDHRRMLRKIDEEAKRG

SEQ ID NO: 16214 - protein, 55 aa, Artificial Sequence
  Synthetic
EDVKRLEEKVRKLLEESKRKLKRLAEEVRKLIKDSRDKIRELERENKEIIKKVKD

SEQ ID NO: 16215 - protein, 60 aa, Artificial Sequence
  Synthetic
DREKEVVDTLRRLIEDARRDNKDLVETHRRLLEDLERDNRELVRTHEERLEEIERRARRG

SEQ ID NO: 16216 - protein, 55 aa, Artificial Sequence
  Synthetic
EDVRRLEKEVEELLRESDRRVEDLERKNREILKRSEDLIRRLKEENRRIIEKVRK

SEQ ID NO: 16217 - protein, 59 aa, Artificial Sequence
  Synthetic
DDERRVVEELERMIRELEKKIREIVKRHEEALKRLKEDNDELSKRHKKMVEEIKRRADE

SEQ ID NO: 16218 - protein, 55 aa, Artificial Sequence
  Synthetic
EEVRRLKREVEELLKRAEELLKRLEDRNRKILRESEEDIKRLERENREIITRVRT

SEQ ID NO: 16219 - protein, 61 aa, Artificial Sequence
  Synthetic
KELDEIIRRVEELIKDDERRNREVLKRSDESTKESHDKARRILEESEKTTEDIKRKVEKDG

SEQ ID NO: 16220 - protein, 56 aa, Artificial Sequence
  Synthetic
EDKIRRLERESRELLRDSEDKVRKSKRKDEENLKRIEEEARRSEKRDEELLREAAK

SEQ ID NO: 16221 - protein, 61 aa, Artificial Sequence
  Synthetic
RELDEIIKTLEKLIEDSHREAREIVKEVKKRLDDDKRRNEEVLKESRETTERIRKEIEERG

SEQ ID NO: 16222 - protein, 56 aa, Artificial Sequence
  Synthetic
EEKIRRLEERARRNVEEMRKLAEELEKESRRILKESAEAVKRSKDEDRKLLEEAKK

SEQ ID NO: 16223 - protein, 59 aa, Artificial Sequence
  Synthetic
SETDKVIEESEKTNRDIKRHSEEVVKDSKRTNTEIERTVEKMIRELEEILERIKRLADN

SEQ ID NO: 16224 - protein, 56 aa, Artificial Sequence
  Synthetic
KDKAKKLKDETDRILETSERLLKALRDETDAIKRKVEELVRRVKEELDRILKKTED

SEQ ID NO: 16225 - protein, 59 aa, Artificial Sequence
  Synthetic
SETDRVVEESERTNKEIERHSEEMVRDSERTNKEIEEHSREVIERLREILERIERLVRK

SEQ ID NO: 16226 - protein, 56 aa, Artificial Sequence
  Synthetic
EEKMRRLKEETDRILDKSRRELKRLKDETDKLLEDSERLLREVEKTLRRILEEARK

SEQ ID NO: 16227 - protein, 59 aa, Artificial Sequence
  Synthetic
SETEEVVKTLKRLLEEIKKHSDDAVRKSEETNKRIREEVERVIKRLKELIEEISELVKS

SEQ ID NO: 16228 - protein, 56 aa, Artificial Sequence
  Synthetic
EEKLKRLKDALDRILEESKRLADELKKRTKDILDEAKDALRKIKEELDKLVEDAER

SEQ ID NO: 16229 - protein, 59 aa, Artificial Sequence
  Synthetic
SETDKVVREVEELIRRLEEHSRRVVEKSERTNEEIERHSRDVIRRSKEINDRIEELARN

SEQ ID NO: 16230 - protein, 56 aa, Artificial Sequence
  Synthetic
KDKMKRLKEELDKLLDDSRRLMKRLKDETDKILDKSRDLLAKTKRESDRILEEAER

SEQ ID NO: 16231 - protein, 59 aa, Artificial Sequence
  Synthetic
SETDKVVDDSRKTNEDIKRHSEEVIRRLEELIREVEEHSRRVEDEVRRILDEIRKLAED

SEQ ID NO: 16232 - protein, 56 aa, Artificial Sequence
  Synthetic
KDKATELKKDTDRILKESEDALRRIKKELDDLLRTSKRLAEELKKELREILERAKR

SEQ ID NO: 16233 - protein, 59 aa, Artificial Sequence
  Synthetic
SETDEVVERLEKILKDIREHSERAIKKLEDILREIERHSRKVIRDSERINTEIKKLAEA

SEQ ID NO: 16234 - protein, 56 aa, Artificial Sequence
  Synthetic
KDKLTTLKKKLDDLLDTSRRLVEKVEEDLRRILEASKRMLEETKKRSKEILDRIRK

SEQ ID NO: 16235 - protein, 59 aa, Artificial Sequence
  Synthetic
SESEEVVREVDKILKEIRKHSKDVIEKLKKLIDDIRRRVRKVIRDSEEINKRIEDLARE

SEQ ID NO: 16236 - protein, 56 aa, Artificial Sequence
  Synthetic
EEDMRRLKERLDKILDDSREMLKRLKDELDEVLEEVERLLRETKKRSDEILKRIKD

SEQ ID NO: 16237 - protein, 60 aa, Artificial Sequence
  Synthetic
SEIEDVIRRAEELIKEDKKRVEDVVREIEKLIRDDARKVRRAIEELKRLLREIEERVREE

SEQ ID NO: 16238 - protein, 56 aa, Artificial Sequence
  Synthetic
KEEAERLRRELEDLHRDVKRLIDELEKDLRRLLEESKRRADRVKEELRRLREEVRK

SEQ ID NO: 16239 - protein, 60 aa, Artificial Sequence
  Synthetic
SEADKAAEDAKRLIDKDREDVERAVKRAEDLIEKDREDVDRAIKESEELNKRAEDEARRR

SEQ ID NO: 16240 - protein, 56 aa, Artificial Sequence
  Synthetic
EEKARRLKEEADKVAKESKELADRLKERADRLHKRARELAERTKEDTDRLVEEAKR

SEQ ID NO: 16241 - protein, 60 aa, Artificial Sequence
  Synthetic
SEIDEVVKEIEKILEDDKRRVDEAIEELEKLIREIREEVRRVIKESEDLNKEIRDRVRKN

SEQ ID NO: 16242 - protein, 56 aa, Artificial Sequence
  Synthetic
KDKAERLRRELKKIMEDSRRLADEIKKRLDRLLEEVKEEIERTKRETDRLLEEVRR

SEQ ID NO: 16243 - protein, 60 aa, Artificial Sequence
  Synthetic
SELDRVVEEIDRLIREDEKEVRDMIRESEKLNRENEETNRKLLEDWDKLSKDIRDRVDKN

SEQ ID NO: 16244 - protein, 56 aa, Artificial Sequence
  Synthetic
DKKARELKEKLDELKKRSEKLLEDTKRETDKLHERSRRELEKLRRKDEELVKRVKD

SEQ ID NO: 16245 - protein, 60 aa, Artificial Sequence
  Synthetic
SEIEEVVERIERLIKRIKEEVERALKESEDLIRDIERRVRELLEEWDRLSERIREVVERN

SEQ ID NO: 16246 - protein, 56 aa, Artificial Sequence
  Synthetic
KDELRRLKEELRKLLEDVKKLLEESKKKTDDLLKRAEDELRKLKEKDDDLLRKVKD

SEQ ID NO: 16247 - protein, 61 aa, Artificial Sequence
  Synthetic
EELDRVVEELDRLIRDNKRRNDEALKESDRLIRENERRNRKAARDWEELSKEIEDRVRKNK

SEQ ID NO: 16248 - protein, 56 aa, Artificial Sequence
  Synthetic
KDKLTTLRKKLDDLHKESRRELERSKKKTDDLHRKSREEVRKLREDDERKLREIKK

SEQ ID NO: 16249 - protein, 60 aa, Artificial Sequence
  Synthetic
SEADEAAKKIEKLIEDNERKNRKALKEWDELTRENEKRNRDAIKESEDLIKEAADEVRRR

SEQ ID NO: 16250 - protein, 56 aa, Artificial Sequence
  Synthetic
EEKARRLREEAEELHRRSEEAARRAEKKDREAHKRSREAIKRTKDDTEELLKEAER

SEQ ID NO: 16251 - protein, 61 aa, Artificial Sequence
  Synthetic
DEIDKVVRKIEKLIDDNRRENEEMLRESEKLLKENEKKNEKAIRESEELIRRIEKRVRENK

SEQ ID NO: 16252 - protein, 56 aa, Artificial Sequence
  Synthetic
KDKARRLEEELKELHKRSKEELEKSKEKTDRLHDKSRRLIEETERRTEELLERVRR

SEQ ID NO: 16253 - protein, 60 aa, Artificial Sequence
  Synthetic
SVEDEVERLERDAEEISRRSETELRRLKKEVEDLNRESKKLLDELREEMEKILKKVREDS

SEQ ID NO: 16254 - protein, 59 aa, Artificial Sequence
  Synthetic
KDEVKRLVEEIERLLKRAEELSRELVRRIEKLIRELAEESRRLVDEIREVLKRLKDRAD

SEQ ID NO: 16255 - protein, 60 aa, Artificial Sequence
  Synthetic
SEIETVLEKLKRLLEEDRELVKRVEDKIRRIIEEDEKTVRDIKKRLDDILREIRDVLEKR

SEQ ID NO: 16256 - protein, 56 aa, Artificial Sequence
  Synthetic
EEELKKVEDELDRVRKETERIIKELREELEELHKRARDLLKEVRDELRKLLEEAKK

SEQ ID NO: 16257 - protein, 60 aa, Artificial Sequence
  Synthetic
SEIEDVVRRIDELLREDKRRVDEVLERNRKLIEDDERLSREIARELDEIIKRLREVVKSN

SEQ ID NO: 16258 - protein, 56 aa, Artificial Sequence
  Synthetic
REEVRKLKERLDKILEDTRRLLEESKRRLDRLHERHRETSEDMKRRIDKLLEEVRK

SEQ ID NO: 16259 - protein, 60 aa, Artificial Sequence
  Synthetic
KEAEDVVREVEELIDRDRKLVERVLRENERLLKEDRDTVKKVLEELEEILKDIERVVRER

SEQ ID NO: 16260 - protein, 56 aa, Artificial Sequence
  Synthetic
EELLRRLKEEIERLLERSRRLVKESEERLDRIREETKRELDRVEEKLRRLLEEVKR

SEQ ID NO: 16261 - protein, 60 aa, Artificial Sequence
  Synthetic
SEIEKVVEEIKKLLKELKETSERILRRNEKIIKEIEETSREVLKELERILEEIEDVVRKR

SEQ ID NO: 16262 - protein, 56 aa, Artificial Sequence
  Synthetic
KDRLKRLRDELERILRDHERLSRESKDKLDKLLERHKELSDEVRKKLKELRDRADT

SEQ ID NO: 16263 - protein, 61 aa, Artificial Sequence
  Synthetic
REIEEVEKEIERIIERIERTSRRVKEENDRLLEEIKRRSEEVKKRNDDIIREIRRVVEEDK

SEQ ID NO: 16264 - protein, 56 aa, Artificial Sequence
  Synthetic
ERRLKELKRKLDKLREDHERLSRRSDEELRRLEEEHKRLSEDSKRELDKLLDEVRK

SEQ ID NO: 16265 - protein, 60 aa, Artificial Sequence
  Synthetic
DEIERVLEEAKKLIRDLEEHSRRVEEENKRLLKEIRETSERVKRELDRILEEIRKTVERR

SEQ ID NO: 16266 - protein, 56 aa, Artificial Sequence
  Synthetic
DEKLRRLEEELKRLLDESKRLLEESEDELRKLEEEHRKLSEEVKRRLDELKKEVET

SEQ ID NO: 16267 - protein, 60 aa, Artificial Sequence
  Synthetic
REIEEIVERVKEIIDRIRRHSKEVEKENEKIIERIRRRSEEVLRTNEKALRDIERRVRER

SEQ ID NO: 16268 - protein, 56 aa, Artificial Sequence
  Synthetic
KDELKRLKEELERLLRESKKLVDESKRRLEELLREHRELSKRSRDKLDELLRRVEK

SEQ ID NO: 16269 - protein, 60 aa, Artificial Sequence
  Synthetic
SEIEEVVRRIREIIEEIRRLSEAALERNKRIIDEIRRTSKRVKEEIERIIRDIRRVVEER

SEQ ID NO: 16270 - protein, 56 aa, Artificial Sequence
  Synthetic
REDVRKLKEDLKELLKEHKRLSEESKKRLERLLEEHERISEELKRRLEKLLKEAED

SEQ ID NO: 16271 - protein, 60 aa, Artificial Sequence
  Synthetic
SEIEEVVKKVKKIIDEIRERSREALERNEKILEELKRHSEEVTRRAEKIIEEIKRVLEKR

SEQ ID NO: 16272 - protein, 56 aa, Artificial Sequence
  Synthetic
KDELTKLEKELEDLREEHRKLSKDSKDRLKKLLDESRELIERLKEKLKRLLEEAER

SEQ ID NO: 16273 - protein, 59 aa, Artificial Sequence
  Synthetic
SEVEEMLKRLDDILKKHRELVKEMKEELDRVIETHRRLVEEVRRRLEKSNDEIDKLVKA

SEQ ID NO: 16274 - protein, 59 aa, Artificial Sequence
  Synthetic
ERVEKALKEVRERLERSHKKAKEDLDRVREEARKSHEDVKRLSEEDRKKSEDLADEVRR

SEQ ID NO: 16275 - protein, 59 aa, Artificial Sequence
  Synthetic
REVEEALERLRKLIEDDRELVKRAKEKLDKLLKDDRKLVEDVLRELKRSNDEVKKLVDS

SEQ ID NO: 16276 - protein, 59 aa, Artificial Sequence
  Synthetic
KRAEEELRRVKEEVDRVLEESKRRLDEVRRRLERIEEESRTKSEEDRKRSEDLVREAER

SEQ ID NO: 16277 - protein, 59 aa, Artificial Sequence
  Synthetic
SEVERLVEDAERVIDEHRKLVTEMERRLERVNREDEKLVRKVLEELKKSNEEIKKLRED

SEQ ID NO: 16278 - protein, 59 aa, Artificial Sequence
  Synthetic
ERAKKLLDEIRKKLDDSNREVEKRSRDDERHTERVVRESKRLSEEDKKRSDELADETRK

SEQ ID NO: 16279 - protein, 59 aa, Artificial Sequence
  Synthetic
SRVEEVKKELDDLIRRHKELVEKVRKELKDLLDKHERLVEEAKKEIEKLIETLKRLAEN

SEQ ID NO: 16280 - protein, 59 aa, Artificial Sequence
  Synthetic
RRAEDELRKVRKEVERSNKEVEEILDDVRRKVEESDKRVKEILKKLREDVKKLLDEVRK

SEQ ID NO: 16281 - protein, 59 aa, Artificial Sequence
  Synthetic
SEVEKLVADADKLIKDHRKLVEEAKKRLDEVNERHRRLVEEVERRLDKSNKELEDLVRS

SEQ ID NO: 16282 - protein, 59 aa, Artificial Sequence
  Synthetic
RRADEELRRISERVKRSNEDVRKKSEDDKRHTDESDRDVKRLSKEDRERSETLMDRVRE

SEQ ID NO: 16283 - protein, 59 aa, Artificial Sequence
  Synthetic
SRVEDVERELEEEIDKHRKEVEDAKRRLDELIRRHKEEVKKLKKKLDDLIEELERLARN

SEQ ID NO: 16284 - protein, 59 aa, Artificial Sequence
  Synthetic
ERAKRSLDRVREKIEKSDRTAKDLLKKVEEEVRKSNERVKELLKRVKDAVDDLLRRRRK

SEQ ID NO: 16285 - protein, 59 aa, Artificial Sequence
  Synthetic
DEVEEVVKRAEDVIRTHKELVKKAKEDLDKIIEDIERELKKMLEDLERSNRRVEELVRG

SEQ ID NO: 16286 - protein, 59 aa, Artificial Sequence
  Synthetic
ERVKKILDDIRRELEESNKKVEEDLRKAEEDLEELLRRARELSKEDEKKSRKLVEDARR

SEQ ID NO: 16287 - protein, 59 aa, Artificial Sequence
  Synthetic
DEVDEVVKRLEDIIRKHETLVKKAKEDLDRVNEEDTKLIRDVLRRLKESNEEMERLVRS

SEQ ID NO: 16288 - protein, 59 aa, Artificial Sequence
  Synthetic
ERVKEELRRVEEDVKKSDEDARRLSKEDRDHTRENFKRSEELSRRDEETSRRLMEEVKR

SEQ ID NO: 16289 - protein, 61 aa, Artificial Sequence
  Synthetic
KDVEDLVRKAEELLKRHREDVTRLLERLKKVNKDHERLVKELKRRLEELLREVRELVERDG

SEQ ID NO: 16290 - protein, 59 aa, Artificial Sequence
  Synthetic
DEVERRLRRLEEELKKSHEEVERRLDEVRRHSKRSHDELRKVLRKLEEDLRRLAEEVKT

SEQ ID NO: 16291 - protein, 61 aa, Artificial Sequence
  Synthetic
SDLEELVKRAEKLLEEHKELVKRLEDRLRELDKRHKEIVERLRKELERLLREIRRIVEEKG

SEQ ID NO: 16292 - protein, 59 aa, Artificial Sequence
  Synthetic
DEAKRKLDELEERLRRSNKELEEKSEENERRTRESNEELERRLEDVRRKLERLREEVER

SEQ ID NO: 16293 - protein, 61 aa, Artificial Sequence
  Synthetic
KDVEDLLRRLEEIIKDHRREVEELLRELTKLDEEHKEEVRRLTEELERLLDEARRLVEEKG

SEQ ID NO: 16294 - protein, 59 aa, Artificial Sequence
  Synthetic
DEAERELERVEREVRKSSDKLRRDSKRNKERTRKSNEELERRLEEVERELRRLVAEVEK

SEQ ID NO: 16295 - protein, 60 aa, Artificial Sequence
  Synthetic
KKVEDLEERLERLLRDAERRVRELLDEARRLLETHRELSKRLLERLEKVNRDIREKAKEK

SEQ ID NO: 16296 - protein, 56 aa, Artificial Sequence
  Synthetic
ERLLRRVEKEVEDLLRTVKDLLRRIEEEVRKSLEESKKLLKEVEDHSRKLLEEIRK

SEQ ID NO: 16297 - protein, 60 aa, Artificial Sequence
  Synthetic
DEDEEVLRRLKELLKTHRKLSEDLLREAEAINEDHRRLSEELLRRLEKLNEEIRRKAKEK

SEQ ID NO: 16298 - protein, 56 aa, Artificial Sequence
  Synthetic
EELLRRVEEEVKKSNEESKKKIKELEEHSRRSNEESERRLREVEEHSRRLLEEIRK

SEQ ID NO: 16299 - protein, 59 aa, Artificial Sequence
  Synthetic
SEVEDIVRKVDEIIRRLERHNEELRKRVEEVLDRLRRHNEKLDRDVKEIIKEIERVIRG

SEQ ID NO: 16300 - protein, 56 aa, Artificial Sequence
  Synthetic
KDLLREIEEKVRRLVRKSEELLRRIAEDVKKVIEDSKDSHKKIEDELRELEERLRK

SEQ ID NO: 16301 - protein, 59 aa, Artificial Sequence
  Synthetic
SEVEDIVRKVDEFLERLKEHNRKLDKEAKELLDRLKRHNEKLDEEAKRLIEEIKRVADE

SEQ ID NO: 16302 - protein, 56 aa, Artificial Sequence
  Synthetic
KDLLREIAEKAERVKEESKRSHDEIADEIRKVEEESERSHREIAEELERLSRRLKK

SEQ ID NO: 16303 - protein, 60 aa, Artificial Sequence
  Synthetic
KDVEDIVREVERLIKELREHNKELVDRAREVLKELKDHNEKLVEDVKRLIEDITRKIRAN

SEQ ID NO: 16304 - protein, 56 aa, Artificial Sequence
  Synthetic
KDLLRDIERKVEKLERDSRRLLREIEEEIRKVIERSKELLERIEKELRDLMRELRK

SEQ ID NO: 16305 - protein, 59 aa, Artificial Sequence
  Synthetic
KEVEDIVEDVKRVLDELRRHNEKLVREVDRLIRELDKHNKELDDRATEIIKRIEEVVRR

SEQ ID NO: 16306 - protein, 56 aa, Artificial Sequence
  Synthetic
KELLERIDEEVKRVEETSRRLLREIAEKVKTLKEKSKRSHEEIRRRLEELADEIRK

SEQ ID NO: 16307 - protein, 60 aa, Artificial Sequence
  Synthetic
SEVEEIVRRVEKLIEDLKRHNEKLVDEVKKVIDTLRKHNEDLVRRVEEVIKRIEEVIREN

SEQ ID NO: 16308 - protein, 56 aa, Artificial Sequence
  Synthetic
KDLLRDIAEKVKTLKEDSRRLLEEIADRVRRLEEDSRRLLEEIRKEVERLKEELKK

SEQ ID NO: 16309 - protein, 59 aa, Artificial Sequence
  Synthetic
SEAEEAAREAKEAIDRLEEHNKKLDEDAKRAIEEARKHNKELDERAKRALEEIEKAARD

SEQ ID NO: 16310 - protein, 56 aa, Artificial Sequence
  Synthetic
TDAARRIAEEVKKLEKKSEDSHRKIAEDVKKAEEDSERSHRDIARRAEEVKKKADD

SEQ ID NO: 16311 - protein, 60 aa, Artificial Sequence
  Synthetic
SEVEKIVREVEKLLEELREDNRDLVRRADKDLERMERHNRKLVKDVEDVLRRIEEVRRAN

SEQ ID NO: 16312 - protein, 56 aa, Artificial Sequence
  Synthetic
KDLLREIERKIREVEEKSRELLREIKKKLEDVARESRRLLEEIARKIEKLSDELRK

SEQ ID NO: 16313 - protein, 59 aa, Artificial Sequence
  Synthetic
SRAERIVEEVEKVITDLERDNRELVRDVRRLLERLERHNKELDDRITEIIKEILRLAER

SEQ ID NO: 16314 - protein, 56 aa, Artificial Sequence
  Synthetic
EELLREIKRKVEELEKRSKELLEEIARRVKEVEEKSRDSHRKIRERLKELVRKVRE

SEQ ID NO: 16315 - protein, 60 aa, Artificial Sequence
  Synthetic
REMEEVLKEAKELLKESNKKAREIDRKIKELLDDSHRKVKETVDRVKRRIEELDRKVKEV

SEQ ID NO: 16316 - protein, 56 aa, Artificial Sequence
  Synthetic
EEVLREVEKELEDNKRELRESHKEIARELERNKEDIDRLVEEIKRRIEELKKRIDK

SEQ ID NO: 16317 - protein, 60 aa, Artificial Sequence
  Synthetic
DEMEKVLKEAEDELRRVEKEVREVDKEAEELLERSHRKVRDIVRRVTEELKRLKDKVEKI

SEQ ID NO: 16318 - protein, 56 aa, Artificial Sequence
  Synthetic
REMLEKLRREVERVKKEVDDSHREIAKKVERNKKEIDKLVREVEREVEELKKRIDK

SEQ ID NO: 16319 - protein, 60 aa, Artificial Sequence
  Synthetic
SEVEEVLEDAKRLLKEVEKRVREIDRRAEDLLRRSHEKVRRIDKDVKRLLREVEKKVEEV

SEQ ID NO: 16320 - protein, 56 aa, Artificial Sequence
  Synthetic
EEVLKKVEDDVRRLDEEVRRSHEDIRKKVEDNKKRIDESHEEIRRLAERVKKEIRK

SEQ ID NO: 16321 - protein, 60 aa, Artificial Sequence
  Synthetic
SEDEKVVKEAKRLLDENRRENKEIDERAEKALEDSHRKVRKIDKEAKELLEKLRRDVEEV

SEQ ID NO: 16322 - protein, 56 aa, Artificial Sequence
  Synthetic
RELLDKVRREVERLKEESKKSHDRIREELRRNKEEIEKSHDEIRRRVEKLDDEIRR

SEQ ID NO: 16323 - protein, 60 aa, Artificial Sequence
  Synthetic
SEVEEVEREVRKLLKESNDKVREIDKEAKKRLKDVEDKAREIDERITKLLKDIEDEVRKV

SEQ ID NO: 16324 - protein, 56 aa, Artificial Sequence
  Synthetic
EEVLRKVEKEVEDNKKELDESHKEVKREVEEVRERIDESHKRIRERADRVKKKIEK

SEQ ID NO: 16325 - protein, 60 aa, Artificial Sequence
  Synthetic
KELEDVLEDVKRLLKESNDEVKEIDDRARRLLEESHRKSEEVDRRAEKRLREIEDKVRKS

SEQ ID NO: 16326 - protein, 56 aa, Artificial Sequence
  Synthetic
EEMLREVEERARKNKEDIEKSHDEIRKEVEDNIRRDRESHKRIEEEARRVMAEIEK

SEQ ID NO: 16327 - protein, 60 aa, Artificial Sequence
  Synthetic
SEVERVLKEADKLLKDNDEKNERVDREVEKLIRDSHEKSKKVDERAKRALDKLDDEVRKV

SEQ ID NO: 16328 - protein, 56 aa, Artificial Sequence
  Synthetic
EEMLREVEKKVETLKKKSDDSHKEIEEKIRRNIEEDDKSHERIREEAEKLKKKIDD

SEQ ID NO: 16329 - protein, 60 aa, Artificial Sequence
  Synthetic
ELEELMKKIEDDSKKNDEDTERLVKEIRDRSKRNREESKKLHDEDRREAKRVLDEARRDV

SEQ ID NO: 16330 - protein, 59 aa, Artificial Sequence
  Synthetic
EEDVRRAIEEVRRLLEKSHRDSRRVIEEVRRLLEKSHRDNRKVNEDSRRLLKKVREDAE

SEQ ID NO: 16331 - protein, 60 aa, Artificial Sequence
  Synthetic
SLEDLVREIREESERNKKETRKLLRRIEEESKRNLDESERLHREDKKRLEDIAERLERRV

SEQ ID NO: 16332 - protein, 59 aa, Artificial Sequence
  Synthetic
EDLVRKVITEVKRLLEESHKESREVIREIKELLEESHEKSKKVNEESKKLAEDVLRKAD

SEQ ID NO: 16333 - protein, 60 aa, Artificial Sequence
  Synthetic
SLEELLKKIREESKRNLDETRKLHREDKEESRKNLEESRKLHEEDRREAERVKRRADREV

SEQ ID NO: 16334 - protein, 59 aa, Artificial Sequence
  Synthetic
EKLVREVVERLRELLRESHERSREVNKRSRDLLRRSHEKSRRLNEESRRLLEEVERRVK

SEQ ID NO: 16335 - protein, 60 aa, Artificial Sequence
  Synthetic
SADELLKKLRDESEKNKDDTRKLLEELRRRAEKNKKDIEDLLREIEKKLREVLEDIKRKV

SEQ ID NO: 16336 - protein, 59 aa, Artificial Sequence
  Synthetic
EEEVKRAVDEVRRLLEESHKKSREVIKRIKKLLEDSHKKVREIVTELDKLIKEVEKKVE

SEQ ID NO: 16337 - protein, 60 aa, Artificial Sequence
  Synthetic
DLKELVDELRKKSDDNLKETERLVREIEKRLTDNKRESERLVREIEKELRDLRERIERTV

SEQ ID NO: 16338 - protein, 59 aa, Artificial Sequence
  Synthetic
KDEVRKAIKEAEELLKRSHEESRRVIERVRKLIEESHRKNREAIKRIRRLIEEIRKEVD

SEQ ID NO: 16339 - protein, 61 aa, Artificial Sequence
  Synthetic
SEIEKVREELKELLERDEREVKRVIDDLRRLIKDLRERVKEVNKRDDETVKEIKKVIEERG

SEQ ID NO: 16340 - protein, 56 aa, Artificial Sequence
  Synthetic
EEVAREVEERSRRVKRKLEELIREIKTELDRVREEIERLSKRDREKNERLREEARR

SEQ ID NO: 16341 - protein, 61 aa, Artificial Sequence
  Synthetic
SEIEDVLRELKKLLTDDKREVERANRDDERTLRDIRRKVEEAIKKLEDLLRDVKRRVDEEG

SEQ ID NO: 16342 - protein, 56 aa, Artificial Sequence
  Synthetic
KDVAEEVERESRKVEKELEDLSERDKERNDRILRTIEELIKRVEEEIRKVKEDVER

SEQ ID NO: 16343 - protein, 61 aa, Artificial Sequence
  Synthetic
SEIEDVLRKLRKLLREDEKRVEDANRRDRDTVRKIEKRSEEAFKESKETNKRIEDKVRKTG

SEQ ID NO: 16344 - protein, 56 aa, Artificial Sequence
  Synthetic
KEVVEEVRDDSRRVEEKLRRLSKEDKEENDKIRRRDRKLVEDLRRDSDRILRKVET

SEQ ID NO: 16345 - protein, 61 aa, Artificial Sequence
  Synthetic
DEIERVVEEVRELLERDKRRSDEVIERLKRLLEKDEEDVDDVIRRSKETNERIRDKIEKEG

SEQ ID NO: 16346 - protein, 56 aa, Artificial Sequence
  Synthetic
KEVVDDLKRLSKKVYDDNKELIDRVRERSREVLRRLKELADELRKLSEKIKRDADK

SEQ ID NO: 16347 - protein, 61 aa, Artificial Sequence
  Synthetic
DDIEEVVKEVEDLLRRDAEDVERAIKELRKLLEDDRDRVRKVNEESRRIIEEIRKAIERRG

SEQ ID NO: 16348 - protein, 56 aa, Artificial Sequence
  Synthetic
KEVVDKLREDSERVKKKAEDLVEEIRRASEEVKKEVDDLSREDEERLEKLKEDARR

SEQ ID NO: 16349 - protein, 60 aa, Artificial Sequence
  Synthetic
SEAEELEDRIRKLLREVEETSRRILKRARELNKRIEEESRRIIKRIKELIDEIKELVRTR

SEQ ID NO: 16350 - protein, 56 aa, Artificial Sequence
  Synthetic
ERLLRKLEREVRRLSEEVTRLDEETRRHSDDLRRRVERLDETTRRELEKLADEVRK

SEQ ID NO: 16351 - protein, 60 aa, Artificial Sequence
  Synthetic
SEAEELIKRAEDLIREIKKRSDDLVREMERLNEEIKRVSDEIIKRIEEVLEEIKKLVKKV

SEQ ID NO: 16352 - protein, 56 aa, Artificial Sequence
  Synthetic
RRLLEKLKRELKDLERRVREENERSKRHSEELVRRARKLNEKTDKDLKRLEEETRR

SEQ ID NO: 16353 - protein, 60 aa, Artificial Sequence
  Synthetic
REIEEVRKEVERVRKRYKDEVRKIVEDARRVLEEHKRRVEKLLEELERILREAKRLTDEG

SEQ ID NO: 16354 - protein, 56 aa, Artificial Sequence
  Synthetic
EDMLREIEKAVRELNEESKELLERIEREVRKSEERSKEVIKEIAERARKVVEDTKT

SEQ ID NO: 16355 - protein, 56 aa, Artificial Sequence
  Synthetic
SEAEKVLTDNRDTLRRLKEELKKVLDENRKTLEELDKRLEEVHKRHNEELDRIRKD

SEQ ID NO: 16356 - protein, 55 aa, Artificial Sequence
  Synthetic
ERVKEELKRIDEDLKRVVDRIKEKAEDIDRKLKKRVKEIMDKARESLKTLEERVK

SEQ ID NO: 16357 - protein, 56 aa, Artificial Sequence
  Synthetic
DEMREVLKRLRELVEELRRELEEVLRRNRETLKRLEEELRRVHKEHNDVLKEIRDK

SEQ ID NO: 16358 - protein, 55 aa, Artificial Sequence
  Synthetic
ERMKDELKKILDEARRVVERIDREAKRIDDELREVVERISRDAKRSLDELDERTR

SEQ ID NO: 16359 - protein, 56 aa, Artificial Sequence
  Synthetic
DEMREVLRELEDELRKIKERLKRVLDRSRELLEEWREELERVHRRNEETLRRIEKN

SEQ ID NO: 16360 - protein, 55 aa, Artificial Sequence
  Synthetic
EEIKRRAEDILRELRRLVEELERRNEEINRRLAKRIKELMEKIRREDERLKKEVE

SEQ ID NO: 16361 - protein, 60 aa, Artificial Sequence
  Synthetic
DKAKRVRTELERRLEKLKRDARKVIEEHEKSLRDLEEEVRRVREEHERSLKELKEELDRK

SEQ ID NO: 16362 - protein, 55 aa, Artificial Sequence
  Synthetic
EDVTRELERVLDELRREVDRVRRELEKIDRELRELVKRIEDELRKINKELKEKSD

SEQ ID NO: 16363 - protein, 61 aa, Artificial Sequence
  Synthetic
DEVEELVKTVRKLVEDHNRKLEEVVRRLREIVKELEDRTRRALEEARRTVKRIEEEVRKRG

SEQ ID NO: 16364 - protein, 56 aa, Artificial Sequence
  Synthetic
ERLLRELKDLLEKSKRRVDELVKEIEKRNRDHKEKVRKIVDEIRRLLRELEERVKK

SEQ ID NO: 16365 - protein, 58 aa, Artificial Sequence
  Synthetic
KLEEILRRIRELLKRHHEKNKKILDDIREKSKKLKKKVDDILTRITEIIKDLEREVDG

SEQ ID NO: 16366 - protein, 59 aa, Artificial Sequence
  Synthetic
ERVLEDLRRKADDIIRRADEESRKIKEEADDIFRRSDELLKRLEDEAKRIADEVRKKTK

SEQ ID NO: 16367 - protein, 59 aa, Artificial Sequence
  Synthetic
DSDRIEETIKKLLKELSDKSKEVLDEIRKRLKDHHDRNRKVLEEIRRILKRLEEEVRRK

SEQ ID NO: 16368 - protein, 59 aa, Artificial Sequence
  Synthetic
KRALKEMLDRVRKIIKEYEDSLRRLKEEVDEIIERADRLSEELRRKAEKIIRDITDAVR

SEQ ID NO: 16369 - protein, 58 aa, Artificial Sequence
  Synthetic
DSEELLREIRKRLEDLSRKSEEIKRRIDEISRDLERKVEEIKKRIEELVRRVRTEADK

SEQ ID NO: 16370 - protein, 59 aa, Artificial Sequence
  Synthetic
RKVLERIREEADEIDKDYDRLLKEIRKKIEDIARDTERRLRELKDRVDKIIKKVEEDER

SEQ ID NO: 16371 - protein, 57 aa, Artificial Sequence
  Synthetic
REIETVTKKSRDLNREIDKKLKELTERVDKLIEEWKRKTDRVREEAKRAVKEIEDKN

SEQ ID NO: 16372 - protein, 59 aa, Artificial Sequence
  Synthetic
EELRRVIEESKRSNDELKKKADELSKRVKEALDRLEEEDKRVLEEIKDILRELRERRRK

SEQ ID NO: 16373 - protein, 56 aa, Artificial Sequence
  Synthetic
SEIEEVEKKSRELNRRVKERLDEVEEESRRLNEKWERDTRRVRERVEEEIKKIEER

SEQ ID NO: 16374 - protein, 59 aa, Artificial Sequence
  Synthetic
EKLDEVLKRSEDSNRELKRRAEELLRDSERTNEELRRRDEEVKREVEEKLKELEKEIRR

SEQ ID NO: 16375 - protein, 58 aa, Artificial Sequence
  Synthetic
SSKEILKEIDERVEELKRRNEKVDREIKEKVKRLEEENEKVDREIKEILKELEKEAEK

SEQ ID NO: 16376 - protein, 59 aa, Artificial Sequence
  Synthetic
EEVLERLRREVRKRIEDYKRKLDKIARDVDETIERYKRKLEEIKRRVEDEARKIKEEIR

SEQ ID NO: 16377 - protein, 61 aa, Artificial Sequence
  Synthetic
SRKEELKRRLDEALKKYEADLDELRRRHEEDVRRSKEENERLLKELEDAVRRAKEEVKKAG

SEQ ID NO: 16378 - protein, 56 aa, Artificial Sequence
  Synthetic
DRRVEKEIREAIERLKRNLERIKRNIEKVREDSKRVNKELRDKIREIIERIDRRLK

SEQ ID NO: 16379 - protein, 61 aa, Artificial Sequence
  Synthetic
SRKEKLLDDARKILKRAEEELKRLYDKHRRIIEEVKRDLERLKKEHEDVVRRVEDVLRKRV

SEQ ID NO: 16380 - protein, 56 aa, Artificial Sequence
  Synthetic
DKELEEDIRRIEDRLRRLLEELEKLIEDSMRELKRVLDELEKHIREVDEELEEDLK

SEQ ID NO: 16381 - protein, 64 aa, Artificial Sequence
  Synthetic
SEAERVKRELDEALKKAKKALEDNKRKLEEALRKHREDAKRWKEELEKALKEAEKAAKDLRRDA

SEQ ID NO: 16382 - protein, 55 aa, Artificial Sequence
  Synthetic
KEAERKLRELEKRAKEALERSKEHSDELEERARKANKEIEDKLKRLAEEAEKEAR

SEQ ID NO: 16383 - protein, 56 aa, Artificial Sequence
  Synthetic
SEAEKIKKDLDKIREDLKRLDREAEERVRRLSEELDRKDRELRKRIDEILKRMRDE

SEQ ID NO: 16384 - protein, 59 aa, Artificial Sequence
  Synthetic
DEDLKRLEDELRKVEEDNRRTLEELRRRVEEVSRRNKESLEDIRRKLEEAIRRLREKTR

SEQ ID NO: 16385 - protein, 56 aa, Artificial Sequence
  Synthetic
DGAEEVDDRLKKADEELRRKDKESDEKTKRIAEELRKLLEESKKKTEDLVRRLDEE

SEQ ID NO: 16386 - protein, 59 aa, Artificial Sequence
  Synthetic
EKRLRELEKKVEDVSRTNKKTLEDNRKKIAEVVKRLDEEIKRNKDTVRRVVERVKKDTD

SEQ ID NO: 16387 - protein, 60 aa, Artificial Sequence
  Synthetic
ERKERLKERLDEVKKEHERLVERWHRENREVLRENRETVERLERELERVLRELRDALREQ

SEQ ID NO: 16388 - protein, 56 aa, Artificial Sequence
  Synthetic
DEELEKRIEEVERKLRDTNRKIEELLKRLKKRHEEVDRELERLLEKLEREAEETRR

SEQ ID NO: 16389 - protein, 61 aa, Artificial Sequence
  Synthetic
SEEEELEKELEKVLRENEESVRRLHKRNRDVLKKNRETLEKLEEDLKRVLERLKRALDRKN

SEQ ID NO: 16390 - protein, 56 aa, Artificial Sequence
  Synthetic
EKEARDEVRRLKKKMDDVDKDVERLVRELEKEHEEVDKDLRRKLDEVRKELEDARR

SEQ ID NO: 16391 - protein, 57 aa, Artificial Sequence
  Synthetic
SEEERLEKELDEVLEDHKRRVEEWKKKMDEVNKKHKESIDRLREELDRVLDEVRKAG

SEQ ID NO: 16392 - protein, 60 aa, Artificial Sequence
  Synthetic
REEALKRLEELVRKLKEKLERINRRIARIVDKNTKEIKDTNDTLRKEVRDLMKELKDRTR

SEQ ID NO: 16393 - protein, 57 aa, Artificial Sequence
  Synthetic
REDEEVKKELRKILEDHKRRVEDWKRRLKKNLEEHRRRVEEWKRRLDELLEKVRRAG

SEQ ID NO: 16394 - protein, 56 aa, Artificial Sequence
  Synthetic
EEEIKRVIERLARDARRINERLRELLERLSEISERINREIEKIIDEARERLEREER

SEQ ID NO: 16395 - protein, 57 aa, Artificial Sequence
  Synthetic
SEKEEVKKRLKDNMRRAEELIRRDDREVEENRKRHDELVKEWDKRLREILKKAEDSG

SEQ ID NO: 16396 - protein, 56 aa, Artificial Sequence
  Synthetic
EKEIKEVLEELSRTSKRLIEDSKRSSERLSERSKRTNEEIERIVRAAKRTIEERER

SEQ ID NO: 16397 - protein, 60 aa, Artificial Sequence
  Synthetic
SVAEELEERLKEIKRESEKSIRDLRRLLEEIERRLRDINRKLDEIVKRVAEKIKDAETKG

SEQ ID NO: 16398 - protein, 59 aa, Artificial Sequence
  Synthetic
KKVVDDVERKLREIIRRHEEELKKIKEDLDKIREDHERLLREWKKELDELITRVAESAR

SEQ ID NO: 16399 - protein, 60 aa, Artificial Sequence
  Synthetic
SVSKKLDDELRKMEREIEKSNETIKKLIEDIRRRSKESRDRLKELLEEIKKRLKEAEERG

SEQ ID NO: 16400 - protein, 59 aa, Artificial Sequence
  Synthetic
EKVVEDIERRVEKVLTDHERELERVERELDDIIRRHEEELEKIERELEKIKEDVDRSAK

SEQ ID NO: 16401 - protein, 60 aa, Artificial Sequence
  Synthetic
DELDRLRELLEELKRRSETVIKEAEELLRKLERELRELIREWKEITERLARRMEDLSRKG

SEQ ID NO: 16402 - protein, 59 aa, Artificial Sequence
  Synthetic
REDLKRIEEELREILKRHRDANKRIKDEVEELLKRVEEMLRRLHEEDRKLLEDLKRETD

SEQ ID NO: 16403 - protein, 60 aa, Artificial Sequence
  Synthetic
RETEEVKKDVDRIRKASEDVARKMEKITRDVAKELRDLIEEWRRRSEELKKELEDLSRRG

SEQ ID NO: 16404 - protein, 59 aa, Artificial Sequence
  Synthetic
EDELKRIEEELRKILKEHEDKNREIKKENDRLNKEVEEEAEKATREDKRLLEKADRDRQ

SEQ ID NO: 16405 - protein, 57 aa, Artificial Sequence
  Synthetic
SEKEEIEKRLDKLLKEHEEENDKIRRTLKEINDRSKEEVERIEERLKDLLRRLRERI

SEQ ID NO: 16406 - protein, 56 aa, Artificial Sequence
  Synthetic
TKRARDRLEELRRESEELIKTARDLVRRSEKEHRDLIERLRRILEELREKLERKTT

SEQ ID NO: 16407 - protein, 60 aa, Artificial Sequence
  Synthetic
SVKEEVRTLLRRLERVSRELIRRLKEMLKTLHEENKKLIDDSRKLIRKIKRDLERVAERR

SEQ ID NO: 16408 - protein, 59 aa, Artificial Sequence
  Synthetic
KDTVKKVKEDLKDILRRHEEANERIRDELRRNLRKHEDDSKKSKEELDRILKKARDDAR

SEQ ID NO: 16409 - protein, 59 aa, Artificial Sequence
  Synthetic
DIEDELRKELEKHHTKSREVKRRLTELLKRHEDRVEEVERRLRKDLKELRDRIEELSKI

SEQ ID NO: 16410 - protein, 59 aa, Artificial Sequence
  Synthetic
EKVAREVEERLKRDHDDLRRVIEEIRKRLEDSHRELKKTIEDVKRRVEELIEEAERRMK

SEQ ID NO: 16411 - protein, 59 aa, Artificial Sequence
  Synthetic
SIREKLREVLERHHRTSRKVEEDLRRKLEDHHRKTREVAERLKEKVDRLREEIKRASRI

SEQ ID NO: 16412 - protein, 59 aa, Artificial Sequence
  Synthetic
ERVVRKIEKDLRDDHRRLKEIAKRIDDEARRDIKRLEEIIKKIEEEVDRLIEEVRRRDK

SEQ ID NO: 16413 - protein, 60 aa, Artificial Sequence
  Synthetic
DKDREIERLAKEAKDRHDKTLEDDRRRLEEVRRKIEETIRRIKKKLDEAKKRLKELVRDK

SEQ ID NO: 16414 - protein, 55 aa, Artificial Sequence
  Synthetic
EEILKELEEIVRRVEEKNKRLHDENEKDTRRVEAVLEDIKRRIDEIVRRLEERIK

SEQ ID NO: 16415 - protein, 60 aa, Artificial Sequence
  Synthetic
DEKDRIDKRMKEVLKKIEELIRRDERRLEKVRKDHEELVRRIEDELRRVLEELKKLVEEK

SEQ ID NO: 16416 - protein, 55 aa, Artificial Sequence
  Synthetic
EDIERKIRELEEKVERELKKIHDENEKLAEKARRDLERIEREIDKLVKDVEDAIR

SEQ ID NO: 16417 - protein, 60 aa, Artificial Sequence
  Synthetic
SEKDKITKTLEDAKRDHRKLVEEDEKALEEVERRHEEIVRRIEEKLKEAKEELDRLVRDK

SEQ ID NO: 16418 - protein, 55 aa, Artificial Sequence
  Synthetic
EKILREIEERIKEVKENLRRVHEENRELAKKVLKDLERILEEIKKIIKELRERVK

SEQ ID NO: 16419 - protein, 60 aa, Artificial Sequence
  Synthetic
SKKDEIEETIRRARERIKTIVDRIREELKRIRDKHKKLVDEDKKTLEEVLRTLRELVRDK

SEQ ID NO: 16420 - protein, 55 aa, Artificial Sequence
  Synthetic
DEILEKVKELVREVEEVLRRIEKEIEDLVRKVEEDLRRIHERNRELAKKADDDIK

SEQ ID NO: 16421 - protein, 60 aa, Artificial Sequence
  Synthetic
SKEEEIEKTLKKIEEDHRELVRRIERALDDARRRHKELVDRDDKELRDAERELDRLVREK

SEQ ID NO: 16422 - protein, 55 aa, Artificial Sequence
  Synthetic
EEILKEIRDLADEARRNLERILRDIERVVEKVERDLKRIHDKNKRDVERVRREVK

SEQ ID NO: 16423 - protein, 60 aa, Artificial Sequence
  Synthetic
KEKDDIDRDLKRAEEEHKRLVDEIRETLKEIEREHRERVKRIKEKLDEAKRRLEKLKRDR

SEQ ID NO: 16424 - protein, 55 aa, Artificial Sequence
  Synthetic
EKILEDIKREVDRVRKNLKEIKEKIDKEREDVKRDLDRIRKEIEELVEKVDRDVK

SEQ ID NO: 16425 - protein, 60 aa, Artificial Sequence
  Synthetic
DKARKIEEDIRRAEEEHKELVKRNEERIKEVAERHEETVRDIERKAEDIRRELKKLVDEK

SEQ ID NO: 16426 - protein, 55 aa, Artificial Sequence
  Synthetic
KEILDEVKKLVDEVRANLEKSHEDIERLVEKVREDLKRIEERLRKIAEDLRRRVK

SEQ ID NO: 16427 - protein, 60 aa, Artificial Sequence
  Synthetic
EEEREIEDTIRRAEEEHRKRVEDNKRRLEEAEKEHRKRVEDNKRRAEEIRRKLKELVDRK

SEQ ID NO: 16428 - protein, 55 aa, Artificial Sequence
  Synthetic
EEILKKVKELVDRVRRNLERSHEKIKRIEDKVRRDLERSHKELEDLMRRMEEEIR

SEQ ID NO: 16429 - protein, 57 aa, Artificial Sequence
  Synthetic
EKKERIEERAKEVEREHREIVKRDEEELERVREEHEESVRRDRKALEDVERDVRRDG

SEQ ID NO: 16430 - protein, 56 aa, Artificial Sequence
  Synthetic
MEDMLRKVKEVADENRERLKELHEENERTARRLRKLNRELHEENKRLVEEIKKEAK

SEQ ID NO: 16431 - protein, 57 aa, Artificial Sequence
  Synthetic
SKAEEIRKELDRVRREIEKRAEEDKRTLEEVRREHEKLVRENEETIKRVEEDVERAG

SEQ ID NO: 16432 - protein, 56 aa, Artificial Sequence
  Synthetic
MEDALREIKEVADEVRKKLRELHEKNKKLMDDNRRKLDKSHKDVREVEREIRERIK

SEQ ID NO: 16433 - protein, 57 aa, Artificial Sequence
  Synthetic
DKERRIEEELEKARRDHKEDVDRDRERLKEVREEHERLVRENKKRLEEIRKELEDRG

SEQ ID NO: 16434 - protein, 56 aa, Artificial Sequence
  Synthetic
MEDLLREVKRVVEKNKEDLKRLHDENEKLAEENRRRLKKSHDEVEKVAEDLKRKAK

SEQ ID NO: 16435 - protein, 57 aa, Artificial Sequence
  Synthetic
EKKERIEDDLRRVKEEIDDLLRKNEKRLREAEDEHRKRVEDDRRRLDEVRKEVDDEG

SEQ ID NO: 16436 - protein, 56 aa, Artificial Sequence
  Synthetic
MEDALRKLKRVADEIRKRLDESHKEIKKVVDDNRKKLEELHRKNRELERKIREDAR

SEQ ID NO: 16437 - protein, 56 aa, Artificial Sequence
  Synthetic
KDEERIKKKLKKLVDENRDLNRRIEETNRRVAEDLDRRLKEIEKRNRDMAEELRKS

SEQ ID NO: 16438 - protein, 55 aa, Artificial Sequence
  Synthetic
DEIRKRAEDAERETRETNRRIRDHTRRVAERVEKVLDEIRRHTEEVKKEVDEKER

SEQ ID NO: 16439 - protein, 56 aa, Artificial Sequence
  Synthetic
SDEERIKDKLEKLVKENEDKNRRILEENKRVADENRRLNEEIEKRLEEMVEELERR

SEQ ID NO: 16440 - protein, 55 aa, Artificial Sequence
  Synthetic
EEIRKRVKEAEDKTEETNRRIEKHHREVKKESEESNKRITDRLEEVKERVTRKRK

SEQ ID NO: 16441 - protein, 56 aa, Artificial Sequence
  Synthetic
KREEDIKRRLEKLAKENRERNEEIKRRLDELVDRNREENEKILRELEKMVRELERS

SEQ ID NO: 16442 - protein, 55 aa, Artificial Sequence
  Synthetic
EEARKRLEELKKETEDTNRRIDEAVERAKEETRRTNERIKEELKRVKKKVTDKRR

SEQ ID NO: 16443 - protein, 60 aa, Artificial Sequence
  Synthetic
SEVETAKEDLKKKVEENEKRIKDVEDKLRKTVEDNRKRLEDVLEELRRSVETLRDLLRKG

SEQ ID NO: 16444 - protein, 55 aa, Artificial Sequence
  Synthetic
EELEKRLREAEEKSDRLLRRLKEESRKAEEDSKRLLKELKEESRRAEEEVRRARD

SEQ ID NO: 16445 - protein, 60 aa, Artificial Sequence
  Synthetic
DEKEEAKERLKELRRRLEETDKRVDEELEKLMREMEDTDRRVKEKVDRSRREADEVLRRG

SEQ ID NO: 16446 - protein, 55 aa, Artificial Sequence
  Synthetic
EELKRRLRKVSEENKESNERLRRKVKRVVDENRRTNKELKETSKKVKEDIERKRK

SEQ ID NO: 16447 - protein, 60 aa, Artificial Sequence
  Synthetic
SELEEVTDRLRKLAEKARRLDKEYEEKSRKLKEEVERIDEDLDRLLKELTDEVREIAERG

SEQ ID NO: 16448 - protein, 59 aa, Artificial Sequence
  Synthetic
EEALRRIEKEIREVEKENRDTLERLRRHDEEVNRTNKETLDRLDEKLKRVEREIDERRK

SEQ ID NO: 16449 - protein, 61 aa, Artificial Sequence
  Synthetic
DEEEDLKEKVKKVETEHEETLKEIRRKLEDVKREHEKTVEEIRDHNRKVEERIRDVERRKD

SEQ ID NO: 16450 - protein, 55 aa, Artificial Sequence
  Synthetic
ERIRERLEELMRDARRLNRELDEKVRKLVEKARRDNTRVKKKSRELMKEIDDELR

SEQ ID NO: 16451 - protein, 61 aa, Artificial Sequence
  Synthetic
DEEEELKERIERVKDENRRSVERLRRELKRVEDDHRETVKDLERRLREVKKEIEELVRRKD

SEQ ID NO: 16452 - protein, 55 aa, Artificial Sequence
  Synthetic
EELKKKLEELMKEVRDLDRELKREVEELEREIRRLNKEIRERIEDLVRKAREAIR

SEQ ID NO: 16453 - protein, 61 aa, Artificial Sequence
  Synthetic
REEEELKKKLDDVRRENEESVKKIKEDIDRVRREHEKTVEEIRRHNKKVEEEIRAEVRRKD

SEQ ID NO: 16454 - protein, 55 aa, Artificial Sequence
  Synthetic
DRIREEIEKLAEEIRRLDERLEEELREIVRKMRELNRRVAEKSKELTEDARRRLK

SEQ ID NO: 16455 - protein, 60 aa, Artificial Sequence
  Synthetic
SEREEIRERLRRNLEELRKSIKKIEDDLRRLEKRHRDAVKEIEDRLRRLEEKLDEMAKRD

SEQ ID NO: 16456 - protein, 56 aa, Artificial Sequence
  Synthetic
REDVKRAVDEIHKHTKEKEDRLRKLLKDLEKNIEDAIRRLEKLLRDLEEEIKEAAK

SEQ ID NO: 16457 - protein, 59 aa, Artificial Sequence
  Synthetic
EESERILEKIRRAAEEDKERIRKAIEELRKLAEEDERKLRKANKEARDSARELRRLLKE

SEQ ID NO: 16458 - protein, 58 aa, Artificial Sequence
  Synthetic
EVVEEARRLIKKWREEVERLNEEIKKLVEDWDRRVKELNERHRDDDRKIEKEVEDEEK

SEQ ID NO: 16459 - protein, 60 aa, Artificial Sequence
  Synthetic
SELEKALEEIKRLAEDDMRRIKKVIKELEKLARDDEKRLREVIERLETEVRKLEELLKRG

SEQ ID NO: 16460 - protein, 58 aa, Artificial Sequence
  Synthetic
EVVDELRKRLKEVKERAEDLNRKLEELIRRWKERVERLNRELEKRMRDVEEKVRREEK

SEQ ID NO: 16461 - protein, 60 aa, Artificial Sequence
  Synthetic
SDLEKILEELKRLAEEDKRKLEEVIKKLEEAARKDAEDLKKVNEEAKKSARELEELLKRG

SEQ ID NO: 16462 - protein, 58 aa, Artificial Sequence
  Synthetic
EVVREIEELLKKIEEEVRRLNEELKRLADEWRREVRRLNEEHKDTDRRIKERVKRAEE

SEQ ID NO: 16463 - protein, 60 aa, Artificial Sequence
  Synthetic
KDMERMLKEIEDLARKLREELKRVLDELRKTAKRDEEELKKVNKEAKESARELEEKLRRG

SEQ ID NO: 16464 - protein, 58 aa, Artificial Sequence
  Synthetic
EVVKELRKLLKKIKDDVRRLDKELDELLRRWEESVERLNREHKKTDEKVEEDVKRTTT

SEQ ID NO: 16465 - protein, 61 aa, Artificial Sequence
  Synthetic
SEEEKVEKELRDLVREDDRRLREVEERVRKVVKEAEDDHRRVKEDIRRMVEEIRKKLDKDG

SEQ ID NO: 16466 - protein, 55 aa, Artificial Sequence
  Synthetic
ERLEDEVRKVEDRSRRMNERIDERLKRVEEESKKAIEELRRELERVKREVEERKR

SEQ ID NO: 16467 - protein, 61 aa, Artificial Sequence
  Synthetic
SEVEEVKKELEKLAREDEKRLEDVKEEVKESARRDKRRLEEVEEDLDRLVKELEDKLRDDG

SEQ ID NO: 16468 - protein, 55 aa, Artificial Sequence
  Synthetic
DELKRKLKRVEERSREVNRELRERDKKIEEDSRRINKRLKKKVDEVKEKVREDTR

SEQ ID NO: 16469 - protein, 61 aa, Artificial Sequence
  Synthetic
DEEEDVRRKLEELARRLKRRLEEIEKRLRDSVKEDRRKLEEVKEKLRELIKKLEDEIRKKG

SEQ ID NO: 16470 - protein, 55 aa, Artificial Sequence
  Synthetic
EKLKEDVERVKRDVRRVIRELEKTDERIERESRKVNEELKELVERVERSVKKADE

SEQ ID NO: 16471 - protein, 60 aa, Artificial Sequence
  Synthetic
DEDREARKKVEALLKEVEDRVRESKKRTKDLLREIEKRLRDTTREIDELRRRIEDLSRRG

SEQ ID NO: 16472 - protein, 59 aa, Artificial Sequence
  Synthetic
EEVLRELKELLDKIRETIERASKENEELLREIEKRIEDANRENTERLRRIEKRIDDDAR

SEQ ID NO: 16473 - protein, 56 aa, Artificial Sequence
  Synthetic
SEKDELRKRVEDIKETAKKVVEELREASRKIHEDNKRVNDRLRKESKRIKDKADKL

SEQ ID NO: 16474 - protein, 55 aa, Artificial Sequence
  Synthetic
ERAREEVRRIEKTIRDTARRVRERVRDSERRFRKLVREWEKLVEDSERKIDELSK

SEQ ID NO: 16475 - protein, 56 aa, Artificial Sequence
  Synthetic
SAKEEIKERVKRIEERLRRLLKELEEKVKRIHDENRKVNKELTDRSKEIKDRLKDL

SEQ ID NO: 16476 - protein, 55 aa, Artificial Sequence
  Synthetic
EEVREELKRIEERLDRTLREVRKTLEDIERRIRKAVEDWRRLVKESEERVKRLTD

SEQ ID NO: 16477 - protein, 60 aa, Artificial Sequence
  Synthetic
SEEERVRKDLKELHEHLKREVDKARKDLEDMHRHSEELAREVRERHERSKRELDELERRG

SEQ ID NO: 16478 - protein, 55 aa, Artificial Sequence
  Synthetic
EEIEERVRRNEDTLRRVLKELRERAKRNKDDIRRVLKELEDRSREIEKKLREAER

SEQ ID NO: 16479 - protein, 60 aa, Artificial Sequence
  Synthetic
TEEERARETLDRLNKHSKELVDRVREKLKRLVEHSRELLRRVDRKHKESEKRVREVSRRG

SEQ ID NO: 16480 - protein, 55 aa, Artificial Sequence
  Synthetic
DEIERRVERNKREIDKVLKELEERVRTNKDEIDKALEKLKRLSEEIKRKMREDET

SEQ ID NO: 16481 - protein, 60 aa, Artificial Sequence
  Synthetic
KEKEELDETIRRLEEHSKKKVDKVRKELKEMDEHSRDEARRVRREHEKSEEKVRRASEEG

SEQ ID NO: 16482 - protein, 55 aa, Artificial Sequence
  Synthetic
EEARERLRKNEEEIKKVLEELERRVRENKERIDDVERELEDLSRKIEEKLDRDDT

SEQ ID NO: 16483 - protein, 60 aa, Artificial Sequence
  Synthetic
KEEEEARRTLERIERRIRKALKEIDETLKRLNDHSAKRVKEVREKHEESRRKVDDVSRRG

SEQ ID NO: 16484 - protein, 55 aa, Artificial Sequence
  Synthetic
EEIRERVKRIKEEMDRALKRLKDKVKENKERIDEVLKDLRRTSKEIKERLDRSTK

SEQ ID NO: 16485 - protein, 56 aa, Artificial Sequence
  Synthetic
SKKEELERLLEEAKKKHEESERRLRESSKKLEEEIRRMKEHSKKSSEDAEDKLRRN

SEQ ID NO: 16486 - protein, 54 aa, Artificial Sequence
  Synthetic
ELLERIKDLVRRSEEENKKLLDEHRKIVKTLKERLEKLNEEHERIVREVERRTR

SEQ ID NO: 16487 - protein, 56 aa, Artificial Sequence
  Synthetic
SSEDELRRLLKEARDTHRESEKRLRDSSKRAEDMHEKSKEDVERSSRELEKELRRR

SEQ ID NO: 16488 - protein, 55 aa, Artificial Sequence
  Synthetic
ERLLDEVRKEMKRSEEENRRLLREHEEVVKKSIKENKELLDKHKEIEDRLREEIR

SEQ ID NO: 16489 - protein, 56 aa, Artificial Sequence
  Synthetic
SEKETLKRLLDEIKKRHKESEDRVRKLVEDAREELDRVADELRKSSEDLRRDLKRA

SEQ ID NO: 16490 - protein, 55 aa, Artificial Sequence
  Synthetic
SKLLREVEKLMEESRKRNEDLLKELRDIIEDLREKLRELLREHREAAKRLRDEIR

SEQ ID NO: 16491 - protein, 57 aa, Artificial Sequence
  Synthetic
DERETLEKLLKEVRDMHEESKKRLTDSSRKLREDLRRVKEELDKTLRDIEERAKEEN

SEQ ID NO: 16492 - protein, 55 aa, Artificial Sequence
  Synthetic
SRLLEEAKKLIEESKRENEELLKEHDKIVKELIKKLRDLLKEVEDRARDVTEEAK

SEQ ID NO: 16493 - protein, 56 aa, Artificial Sequence
  Synthetic
SSRETLDELLRRAEEIHRRSEEELRRSSEEVRRKHEKSERDLEKLLRDAEELLRRE

SEQ ID NO: 16494 - protein, 55 aa, Artificial Sequence
  Synthetic
DKLLDTVRKLVETSRDENRKLLEDHKKMVKESEDRNRELLRDLERVIEELSRRIR

SEQ ID NO: 16495 - protein, 56 aa, Artificial Sequence
  Synthetic
SEVEEILDRLRREVERSKKKVEDILRELKKLAEDTKEKVERVLDRNRKTIEELKKA

SEQ ID NO: 16496 - protein, 59 aa, Artificial Sequence
  Synthetic
EDLVTKLRDLLRRHHETLRRLAKELRDLLKKHHEELRRLIERLEKSLEDLERELDKTRR

SEQ ID NO: 16497 - protein, 57 aa, Artificial Sequence
  Synthetic
SEVEKILEDLKKLIKESKDEADRILTDHRRLVKETEEEARRALERNRKTVDDLRKAN

SEQ ID NO: 16498 - protein, 59 aa, Artificial Sequence
  Synthetic
EEALRELRRLLKEHHEILRKVEEELRRSDEEHHRRLEEVERRLRKSLRELEETVRETTR

SEQ ID NO: 16499 - protein, 57 aa, Artificial Sequence
  Synthetic
SEAERILEKLDRLVKETDRRVKEVLEDNRRTVRRLEEEVKRILKENRETARELEEAN

SEQ ID NO: 16500 - protein, 59 aa, Artificial Sequence
  Synthetic
EEVLRRLKKLLDEHNERLRRLERDLDRSLKEAKETLDELERRLEKSLRELKESVDRTRK

SEQ ID NO: 16501 - protein, 60 aa, Artificial Sequence
  Synthetic
SSEERLKEEFKRAAEKVRKVEEELRELHERVEKSSRDSKRRIRELLKRAEEEVKRVEDRG

SEQ ID NO: 16502 - protein, 55 aa, Artificial Sequence
  Synthetic
DEVLRDLKRLIEELEDKARRVLDKSRRIIERLRRKDEEVLRKLEKEIRELKKKAN

SEQ ID NO: 16503 - protein, 60 aa, Artificial Sequence
  Synthetic
DEERELRRLLEDVKRRVREVEEELRRLHEEIKRTSKRSKEELRKLHKELEDAVREMAKRG

SEQ ID NO: 16504 - protein, 55 aa, Artificial Sequence
  Synthetic
DKVLRDLEELVKELKRRLDEVLETSRREAEKLKRDDEKVLRESKKIMEDLRRRAE

SEQ ID NO: 16505 - protein, 60 aa, Artificial Sequence
  Synthetic
SEEDELRKLLEELRRRSKEVNDRLRKLHDELRRRVEDLKRKLRELHKEAAKIVEEMKARG

SEQ ID NO: 16506 - protein, 55 aa, Artificial Sequence
  Synthetic
DKVLEDLRRLVEENTRRLEEMLKRSEKIARDLLEDVKRFLDESKKKIDTLRRRAE

SEQ ID NO: 16507 - protein, 60 aa, Artificial Sequence
  Synthetic
SLEDELRRLLTEAEKRSKDVNERLRDLHREVRELSEDVNRKLEELHRELEERVKELKREG

SEQ ID NO: 16508 - protein, 55 aa, Artificial Sequence
  Synthetic
DEVLKKLKELVRRNEEELEKALKESKDIVEKNKRDLDEVEKKSREIVRELIERTK

SEQ ID NO: 16509 - protein, 60 aa, Artificial Sequence
  Synthetic
SLEETLEKLLREAEDISRKANKRLEEAHERIKRTLEDLERKLEKLNKEVRDRVERVKERG

SEQ ID NO: 16510 - protein, 55 aa, Artificial Sequence
  Synthetic
DKVLEKLKRLIEENKKRLERVLEKSDKILDDLRRKVEEVLKRLEKTVKDLEDEAR

SEQ ID NO: 16511 - protein, 61 aa, Artificial Sequence
  Synthetic
SEDEELLRRLEETIRRATERVKRLLDTLRKLAEDVRKELERLLDTHRELAKRIEDELREGR

SEQ ID NO: 16512 - protein, 55 aa, Artificial Sequence
  Synthetic
EEVERVLREVTKRLRDLKREHRKLLEKVKRELEKVEEDHRDSSRKLEEIIKEAEK

SEQ ID NO: 16513 - protein, 61 aa, Artificial Sequence
  Synthetic
SEAEKLAKDIREAAKRLREHAERDKEELKKAADKLRDEARRDAEKLKRAAEKLKDLARRTG

SEQ ID NO: 16514 - protein, 59 aa, Artificial Sequence
  Synthetic
EEAAKRIKELLDKARKDLEDAKREAEELNRRAREELEKAKKDAEDLNRRAKEELDKARK

SEQ ID NO: 16515 - protein, 60 aa, Artificial Sequence
  Synthetic
DDKDKLLEELRKVIEELEKKLEDNNRELEKVLEKLKREAERDLERLREMIRRLEELLRRD

SEQ ID NO: 16516 - protein, 59 aa, Artificial Sequence
  Synthetic
EEVLDRLRRIIEELRERLKRAEKSNRDILERIDRELEKLKRRAEELNEELRRRLKERRD

SEQ ID NO: 16517 - protein, 61 aa, Artificial Sequence
  Synthetic
SRTEEVLKELRTLMRELRRRLEEVIKELEKSAEELERIAREVAKRSRKVIEELKRKADKDG

SEQ ID NO: 16518 - protein, 55 aa, Artificial Sequence
  Synthetic
EELEDLLRRIRETLEDMKRRLDELDTELEKRLREVARTLDELHKELEETLRRLKK

SEQ ID NO: 16519 - protein, 57 aa, Artificial Sequence
  Synthetic
DAEDELRELSKRNKDEVREVKERLKKLSEENRRDLERVKRKLEKDSEENREALEREN

SEQ ID NO: 16520 - protein, 55 aa, Artificial Sequence
  Synthetic
EELKKRIEELIRRSRKLAEDLKKKLEDIHRETERLVRELAELVRDLHRRTKEKAR

SEQ ID NO: 16521 - protein, 57 aa, Artificial Sequence
  Synthetic
SAEDRLRELSKRNREEVEEVEKRLRELMERIRRRLREVKEDLRRLSEENRKTLERKN

SEQ ID NO: 16522 - protein, 55 aa, Artificial Sequence
  Synthetic
EEIEERIKRLIKESRDLARELEEKLRKLLEELEKLAKRLREKVKELHDDTERAAK

SEQ ID NO: 16523 - protein, 58 aa, Artificial Sequence
  Synthetic
SEEDELRELSRRNEEEVKKAKRDLEKLSRENEEDLKRVKRKLEKKSEDNRRILERDNR

SEQ ID NO: 16524 - protein, 55 aa, Artificial Sequence
  Synthetic
EEVKKKIEDLIRRSRELVERLKRKVEELHKTTKRLVEELEKTIDRIIEETRERAR

SEQ ID NO: 16525 - protein, 60 aa, Artificial Sequence
  Synthetic
SAEDELRRLLRENRERNKKADKDIKKLLDDNRRDLERLRRELERILREIEKRLKDVEKDV

SEQ ID NO: 16526 - protein, 59 aa, Artificial Sequence
  Synthetic
EDVVRELMKKVDDDHKESEKLVRESEEKLERDNERTRRIADKLRKELDDTREEIERDAK

SEQ ID NO: 16527 - protein, 56 aa, Artificial Sequence
  Synthetic
DSEERAEDVARENKEILERVDEKARKLLDDNRKVVEELKKTNEESSRELKRVLDEL

SEQ ID NO: 16528 - protein, 59 aa, Artificial Sequence
  Synthetic
EETVEELLKKMRAISRDSERKVKELLDKIRELSDRSRRRAEELNKEHKKIVDDIAERRR

SEQ ID NO: 16529 - protein, 57 aa, Artificial Sequence
  Synthetic
SVEERLRELVKENRDVVRRAEEEFRRLVEENKRILEEIDRRARESSRKLKDVLDKLN

SEQ ID NO: 16530 - protein, 59 aa, Artificial Sequence
  Synthetic
EETMERLLRKAKEISRRSKERLKRLLDKVKKLSEDSERELKKLLDEHEKIVEDIEREAR

SEQ ID NO: 16531 - protein, 56 aa, Artificial Sequence
  Synthetic
DDERRLREVSDRNRRILDRIKKEVERLLDEVRKILKEAEDRLRRSSERLEELLRKD

SEQ ID NO: 16532 - protein, 59 aa, Artificial Sequence
  Synthetic
EREVKKTLDEMRRRSRESEEELKKLLKEIKEIVEELKRKLDTLLKEHKEIVEEIKRRTT

SEQ ID NO: 16533 - protein, 56 aa, Artificial Sequence
  Synthetic
SDEERVRRLEEEVDKTLEKVERELRKVSEENKRTLDRLRAEMEKSSKELERVLEEL

SEQ ID NO: 16534 - protein, 59 aa, Artificial Sequence
  Synthetic
ERDVERTLRKIEETVKKLAEDLKRLLDEIKKISEESKRRAEELLRKHKKIVDDIDKRTR

SEQ ID NO: 16535 - protein, 60 aa, Artificial Sequence
  Synthetic
SMKEELDRLLKELRERNKEIEDRAEELLRRSTDSLRKVKEKLDKLLEESTRILRKVEKEN

SEQ ID NO: 16536 - protein, 55 aa, Artificial Sequence
  Synthetic
EKVLKDIKRVIDEDEERLKRVLDDYERRVRELEDKVKKILDRYKTEVDKLRERAR

SEQ ID NO: 16537 - protein, 60 aa, Artificial Sequence
  Synthetic
SVEEEIRDLLRKLREIVDRVRRRLKEILEESTRRLEEVTRRIDESNEDLKRAVDDVKRRN

SEQ ID NO: 16538 - protein, 55 aa, Artificial Sequence
  Synthetic
KEVLRKLEEEIEKLRKEAKKILDEYRKLVEDLADKIKKILDRNRKLIEELVREVK

SEQ ID NO: 16539 - protein, 60 aa, Artificial Sequence
  Synthetic
SESEKTLKDLDEISKRYEKKVREMLERHKRLSEETKKRDDEALERLTRLVKELKDVARRG

SEQ ID NO: 16540 - protein, 59 aa, Artificial Sequence
  Synthetic
EDVKRRLDELLERHKRISEEVEKRNEDLLREHEEISRRSKKRIDDLLREAERILDEMRR

SEQ ID NO: 16541 - protein, 60 aa, Artificial Sequence
  Synthetic
SESEKVLRDLEKISEDTARRLEDELRKHKEIVDRIKEEDDEMLDRLRKLVETLKRLAERG

SEQ ID NO: 16542 - protein, 59 aa, Artificial Sequence
  Synthetic
EEVKRRLEELLKRHKEESDRARERNERLLKEVRDLSEESRERIERLLRELEERVREDER

SEQ ID NO: 16543 - protein, 60 aa, Artificial Sequence
  Synthetic
SRSEKSLKELREISERTRKRLEDKLDRHEKESKKVEDKAREVLKELEDLVRTLEEVARRG

SEQ ID NO: 16544 - protein, 59 aa, Artificial Sequence
  Synthetic
EEVRRRLRELLERHKRISDEARKRNEDLLREHEKRSRDIEKRLDDLLKEAEDRLRERKR

SEQ ID NO: 16545 - protein, 59 aa, Artificial Sequence
  Synthetic
SDEEELRRLIEEHEKILKEIEDRVRESSKRNKEILKRLEDEVRKLLETVKDRLEKARER

SEQ ID NO: 16546 - protein, 59 aa, Artificial Sequence
  Synthetic
SETAKRVLDELKERSERSMEDLKRLLKEHKERVDEMRRRAEELLKRLREVIRKVEEEIR

SEQ ID NO: 16547 - protein, 56 aa, Artificial Sequence
  Synthetic
SRDEEVKRLKKEHEDILEEIRKRVDESSKRNEKILREIKERVKRSSDDLKRLLEEL

SEQ ID NO: 16548 - protein, 59 aa, Artificial Sequence
  Synthetic
EEDVERVLREFEEVSRRSEETLRRLLEKHKELVERAARELETLLKEHRERVRKIEEEAK

SEQ ID NO: 16549 - protein, 60 aa, Artificial Sequence
  Synthetic
SSKERLEKLLRELEEDLRRAHEEHKRLIKRLREILDEIRKRVEKLNRDLDRVLERAREEG

SEQ ID NO: 16550 - protein, 55 aa, Artificial Sequence
  Synthetic
EELLKEVKEMIKRLRKKIKKSLDDVRRVIRELEEHARRDLRKLEKDLKDIEDKLR

SEQ ID NO: 16551 - protein, 60 aa, Artificial Sequence
  Synthetic
DSEERLKELERRLRELLKRVSERSKKLNKEHEEINRKAEEEVERLNRELERDLEDAARKG

SEQ ID NO: 16552 - protein, 55 aa, Artificial Sequence
  Synthetic
DELLREAEKMLKELEELVREDEKRLKDISKEVEEHYRKDLEDVKRAIKEIRDRLK

SEQ ID NO: 16553 - protein, 60 aa, Artificial Sequence
  Synthetic
DSERRLEKLLRELKELLKRVEESLRRLNEEHKRINDEARERSKRLNEELEETLRKAREDG

SEQ ID NO: 16554 - protein, 55 aa, Artificial Sequence
  Synthetic
EELLKEIKDRLKELAEHVERDERRLKRISEEAEKRYREDVREVKEMIEEIERELR

SEQ ID NO: 16555 - protein, 60 aa, Artificial Sequence
  Synthetic
ESEERLRDLIRKIRELLEEIERRLRDLNRRLREILKRIEEESEKLNRELKKILDEARERG

SEQ ID NO: 16556 - protein, 55 aa, Artificial Sequence
  Synthetic
EELLKEVRERLRELEEHARRDLETLKRMIRKLEEEAKKDLRELEKMIKDIRDKLK

SEQ ID NO: 16557 - protein, 60 aa, Artificial Sequence
  Synthetic
SLEEALRKLEEELERLNEEAKRRIDRLIEELRRLNEEARKKIERLIEETRELLKRLAEEG

SEQ ID NO: 16558 - protein, 55 aa, Artificial Sequence
  Synthetic
REILERAKELLKKLEREYRELLKKIEKVVRDLEEKYRELLKRHRKETERLDREVR

SEQ ID NO: 16559 - protein, 60 aa, Artificial Sequence
  Synthetic
ELAERVKRLIEEHRKTDKEVEDRIRKLIEDHDRENRKVEDEIRKLIKELREIVDRARKEG

SEQ ID NO: 16560 - protein, 55 aa, Artificial Sequence
  Synthetic
EEILDKIREVHRRVRKKARDLAERIKDAHRKLRKKVEELLRRIKEMIRRLEEELR

SEQ ID NO: 16561 - protein, 60 aa, Artificial Sequence
  Synthetic
SDRERLTRLIEELRKLLEKWEREVKKINDEIRRTVEKVEEDSKKSIEDLRRLLKEMEDRG

SEQ ID NO: 16562 - protein, 56 aa, Artificial Sequence
  Synthetic
TKDLERRIEDVIRRLKKLADDDLRDLRRFLKELKERADKLRKEDEEALKELRDRAE

SEQ ID NO: 16563 - protein, 60 aa, Artificial Sequence
  Synthetic
SREDDIRRLIEEARKLVEDAERRSKKSIDDIRRLVKEWEEEVKRINDDLKRLIDEARKRG

SEQ ID NO: 16564 - protein, 56 aa, Artificial Sequence
  Synthetic
DKDLKERIKKLLDELRRLVEELEKRDKEMLDRIKKLADDDRRELERILKKLEDDLR

SEQ ID NO: 16565 - protein, 60 aa, Artificial Sequence
  Synthetic
SAEDTIRTLLERHDDLDREVEERSKESIRELRRLIKEWRERVRKLNEELKRLLDDLRRKG

SEQ ID NO: 16566 - protein, 56 aa, Artificial Sequence
  Synthetic
KEELIEEIKEMNKKAKKSVDELEKKDRDVLDEIRKMAKEDLDRLRKALEDLERDAR

SEQ ID NO: 16567 - protein, 60 aa, Artificial Sequence
  Synthetic
SSEDRVRDIERRHKEEDDRVEEESRRSTREIRELLRTAKERSDDSIRKLRKLIDDLRKEG

SEQ ID NO: 16568 - protein, 56 aa, Artificial Sequence
  Synthetic
TEELEKELEDVNRDVDRSAKRLKERDEEALKTLEDEIRKLEEKDKKVLEDLEREAR

SEQ ID NO: 16569 - protein, 57 aa, Artificial Sequence
  Synthetic
SDKEEVDKLKERNERVLEEVRRRLEKLEKDNKDTLKKIRDDSERLREKIKRVRDREQ

SEQ ID NO: 16570 - protein, 59 aa, Artificial Sequence
  Synthetic
REFVEKALREYEELLKRSRETLEELLRRYKKLLDESRKTAKEDLDRSEEIIKKLADESK

SEQ ID NO: 16571 - protein, 57 aa, Artificial Sequence
  Synthetic
SDEEEVKKLHDENKKVNDEMREESKKLHDENDRVNKEVKERAKKVSKELEDMLRREQ

SEQ ID NO: 16572 - protein, 59 aa, Artificial Sequence
  Synthetic
EETVRRLLEKVREEIRRSKKRADDDLKTTKELIEKSEREVDRLLEEIKKIIEELERRAR

SEQ ID NO: 16573 - protein, 56 aa, Artificial Sequence
  Synthetic
SELEKVLREVEENLREVKRENEEKLRRNEENIKRLEEEDRRRLEEIEKMIEEIERA

SEQ ID NO: 16574 - protein, 58 aa, Artificial Sequence
  Synthetic
EVEEELRRLREEYEEVSRRSKEELEKSLRRLEEVHKESRKRLRDLLKKLDDVAREERK

SEQ ID NO: 16575 - protein, 56 aa, Artificial Sequence
  Synthetic
DELRELLKDIKRTTEDVEREVEEILRKVEEMIRRLEEEDRKVLEDIRRKIEDIRRA

SEQ ID NO: 16576 - protein, 58 aa, Artificial Sequence
  Synthetic
EVRKEMERLRREHEDVDKKVRDELRKLEEELRRVHRESEKALRDLLRKLREVAEREKT

SEQ ID NO: 16577 - protein, 56 aa, Artificial Sequence
  Synthetic
DELEDFLRKVERVIKELRDDDKRALDRIREVTKDVERKAREILKRVEEVIRRIEES

SEQ ID NO: 16578 - protein, 58 aa, Artificial Sequence
  Synthetic
EAEEALERLKTRLEKVHRDSKRALEKLRRDHEEVDKRITEELRKLMERLKRVVDELRR

SEQ ID NO: 16579 - protein, 59 aa, Artificial Sequence
  Synthetic
SADEALRELEERNRKVNEDVKREDERLHREDREVNKRIREEDKKLHKTLRDVLEELRKK

SEQ ID NO: 16580 - protein, 59 aa, Artificial Sequence
  Synthetic
ERRVEKLLRRYKKVLDEVKRELKESLDKAERVTRKSEDDARRSLEEIKKEIEEVRERIR

SEQ ID NO: 16581 - protein, 59 aa, Artificial Sequence
  Synthetic
RVDEELRKLVEDNKRKNEEVKKELKKLKEENERVNKEVRERDRKLHEKLRRVLEEVRRT

SEQ ID NO: 16582 - protein, 59 aa, Artificial Sequence
  Synthetic
EEEMRRLLEEYEELVRRVLKRLKEILEEYERLVRRVEEEVKKSLEDIERKIKEAKDRVD

SEQ ID NO: 16583 - protein, 59 aa, Artificial Sequence
  Synthetic
DVEEEVKKLKDKNRRINEEVKKRMRELEERNKELNKRIREEDERLHRELRKVLEEARKT

SEQ ID NO: 16584 - protein, 59 aa, Artificial Sequence
  Synthetic
REEVEKLLREYEERLERVRKRVEEILAKYKELLDRVEERARKSLKEIKETIEDARRRIK

SEQ ID NO: 16585 - protein, 59 aa, Artificial Sequence
  Synthetic
SMDEELDKLTRENEAVNERVEREARRLKEENRKVDEEVRRAVEELKERVRRVLEEVRRK

SEQ ID NO: 16586 - protein, 59 aa, Artificial Sequence
  Synthetic
EEDVRRLLEEYARLVREAEREVREILRKYEELVRKARKDAKKLLDDIERKIEKIKRDVD

SEQ ID NO: 16587 - protein, 59 aa, Artificial Sequence
  Synthetic
SMDEELKKLVKENEDLNRRVREEAERLRKENEKVDEDAEREDKRLHDKAERVLRELRRR

SEQ ID NO: 16588 - protein, 59 aa, Artificial Sequence
  Synthetic
ERTVTELLKEYRELVRRVEERVKKILKEYKEEVEEVKRRLEESLKDIERKIDEIRRRAT

SEQ ID NO: 16589 - protein, 59 aa, Artificial Sequence
  Synthetic
SMDEALEELTRRNEEVNKRIEEEDRKLHKRNKEVDDEVRKRDKDLHDELRRVLEDARRT

SEQ ID NO: 16590 - protein, 59 aa, Artificial Sequence
  Synthetic
EDEVEKLLREYKRRVEEVKKRAEDSLKRYEEEVKELEDEVRESLERIRRDIEDVKRRID

SEQ ID NO: 16591 - protein, 59 aa, Artificial Sequence
  Synthetic
SMDEAVEKLKKENKDIDEEVRRRLDELRKRNEEVNKKIKEDDDRLHKEAKEVLEDVRKT

SEQ ID NO: 16592 - protein, 59 aa, Artificial Sequence
  Synthetic
EDIVRKLLREYEKLLREVRERARRILEEYKRLVKEVRERAERSLEELKREIKKVRDRAK

SEQ ID NO: 16593 - protein, 60 aa, Artificial Sequence
  Synthetic
SEKEELLRKAKEVIDRIRKELEELLRRAREVNKDSRRTVEEVLRKAREVSERVRKASERG

SEQ ID NO: 16594 - protein, 55 aa, Artificial Sequence
  Synthetic
EELDDLRRRAEELLKRAEDEIRKLHEENKRSNEEAERAIRELAKRNKELDDKTRE

SEQ ID NO: 16595 - protein, 60 aa, Artificial Sequence
  Synthetic
KEKEDLIEKMKKVLEDIRKRLEELLKRARKVNEDSRKLVKEVLDKIKKVNEDVRKVATES

SEQ ID NO: 16596 - protein, 55 aa, Artificial Sequence
  Synthetic
EELTRLAREIEKLLEEARRRVEKLHEENKRSNEEAKERMERLRDHNRKLDDDTRK

SEQ ID NO: 16597 - protein, 60 aa, Artificial Sequence
  Synthetic
REREELIKKVRTVHKRSEEELRRHSEEVKKVNRDSRERVKEHLKRVKEVIKELEDVARES

SEQ ID NO: 16598 - protein, 55 aa, Artificial Sequence
  Synthetic
RELKELADRNKKLLEDIEREHKKLHEDNRRSNEDARRRHEELKREVEKLLDELRK

SEQ ID NO: 16599 - protein, 60 aa, Artificial Sequence
  Synthetic
SLEEEIKRLVKHHEELLREVRKRLKELEDHHRELDERHRRMLEELVREARKLIKDVKDDI

SEQ ID NO: 16600 - protein, 59 aa, Artificial Sequence
  Synthetic
EETVERILRTLKTTDERTTDTVREILRKIKRTNEESKETADRTVKRAKDLIREIRERVR

SEQ ID NO: 16601 - protein, 60 aa, Artificial Sequence
  Synthetic
SAREAIKEIKKHHKKLLEDVKETIDRIEEHHRKLDKDHRDELKKLLEEVRELLRDIRSRI

SEQ ID NO: 16602 - protein, 59 aa, Artificial Sequence
  Synthetic
ERTVEKILEELKDMNRATKRRVEEILRRLKKTNDESEKRARDTLTRIKELIEEVERRAR

SEQ ID NO: 16603 - protein, 58 aa, Artificial Sequence
  Synthetic
DESEELKKEAKEILDRLEKVLRELTDRNREMLKRIEKLIRENEKRLEDILREIAKRAS

SEQ ID NO: 16604 - protein, 59 aa, Artificial Sequence
  Synthetic
EEVEKELKRIKDELKRLVEKAERSLRESEERLRRLLEEAEKRNRKVEREIEKLLDDTRK

SEQ ID NO: 16605 - protein, 56 aa, Artificial Sequence
  Synthetic
SKEEKITRDAEEVLRRSEEIIRRLLRRLEEVLKDLERSARENKKRLDKILEDLAKL

SEQ ID NO: 16606 - protein, 56 aa, Artificial Sequence
  Synthetic
EKRVKRMEEELRRLHEEVRRRVEKVKRDMDRLNKKIKEDSRRVNEEIRKLLEDKTR

SEQ ID NO: 16607 - protein, 56 aa, Artificial Sequence
  Synthetic
SEEEKVRKELEEVLRRSDEDIERNRRRLEKVLDDLRRSAEENKRRLKEILDRLKDT

SEQ ID NO: 16608 - protein, 56 aa, Artificial Sequence
  Synthetic
EKEVRKVKDRLDKLHEKVKRISEEVNERIRRLNKRIKEISKRLNEELEELLRRRRT

SEQ ID NO: 16609 - protein, 56 aa, Artificial Sequence
  Synthetic
DELEKFKEDVKEVIKKLAETIKRLLDDVRRVLEKLRKLAEENKERLDRILDELRRL

SEQ ID NO: 16610 - protein, 56 aa, Artificial Sequence
  Synthetic
EKEVARLREEIKKLNERLKREVERLKRELEKLLRDIEKTSEDANRRLKELLDRTRK

SEQ ID NO: 16611 - protein, 56 aa, Artificial Sequence
  Synthetic
RREEELLERAEEVLEKLERIIEETERELKEVLDRLRKSIEDNLRRLKKVLKELKDN

SEQ ID NO: 16612 - protein, 56 aa, Artificial Sequence
  Synthetic
EKDLTEVKKRLRDLLKKMEDVLREVKKRLDDLNREMDDRSRKANEELRDLVRRKEK

SEQ ID NO: 16613 - protein, 61 aa, Artificial Sequence
  Synthetic
DVERKLREVEERHKDVLKKAKELLDKVEEDHKKSSKEVEDVLEEMRRRAEKLVRDAVRKKG

SEQ ID NO: 16614 - protein, 59 aa, Artificial Sequence
  Synthetic
DELARRIEEELEKLLRTLEELVTEIIKELEKLLKTHEDLLREVEKTLRRIIEELEKRDK

SEQ ID NO: 16615 - protein, 61 aa, Artificial Sequence
  Synthetic
SVEETLRTVEEEHRKSSKEAEELLEEVERRHEESSKRLEDTLREAEKEVRRLAEDVVRRRG

SEQ ID NO: 16616 - protein, 59 aa, Artificial Sequence
  Synthetic
KELVDEARRELKELLETHKETVKRVLDKLRDLLRTHEEKMKDVEETLRRLLERLKEETR

SEQ ID NO: 16617 - protein, 61 aa, Artificial Sequence
  Synthetic
KVEDSLREVKKRHKDKVDEVRKRLREAEEENKRLLDEVRRELERVEERIRRIVEEIVRKKG

SEQ ID NO: 16618 - protein, 59 aa, Artificial Sequence
  Synthetic
DEEARDIERRLRDLERTLEELVKEADERLKRSNEEDEERIRRVRKKLEELLRELEKRDE

SEQ ID NO: 16619 - protein, 58 aa, Artificial Sequence
  Synthetic
DEDRDLKRELDRLLREHEELVDRSTKRLEKLLRKHEREARESKKELEKLNDELREIAR

SEQ ID NO: 16620 - protein, 59 aa, Artificial Sequence
  Synthetic
EDVKRKLEEVRRRIEESVKRHRETVEEMRRRVDESVRRHERTVDELRRTHEELIERVRR

SEQ ID NO: 16621 - protein, 59 aa, Artificial Sequence
  Synthetic
KDEEKIIEDLKRLLRKHEKLVEESRERLKRLLETIRKIAKDIVERLKRLNEELREIAKR

SEQ ID NO: 16622 - protein, 59 aa, Artificial Sequence
  Synthetic
EEAREKIKRVVEELKESVERHERDVDRVRREAERLLEEVTRRIETVRRTHERLIEEIKK

SEQ ID NO: 16623 - protein, 59 aa, Artificial Sequence
  Synthetic
SEKDEIKRELEELLREHEKLAEESRRRAEELLRDIERRARESLTELRELNKKLREEARR

SEQ ID NO: 16624 - protein, 59 aa, Artificial Sequence
  Synthetic
EDVEREIRKVREDLKRSVDEHRKDLERIRRELEELLEKHHEDLRDVERTHRELLKEIKR

SEQ ID NO: 16625 - protein, 56 aa, Artificial Sequence
  Synthetic
DVEDELRRLHEENKDLLREAEEELERLHRENKKLLEDARRLLERLEEELERIERRL

SEQ ID NO: 16626 - protein, 59 aa, Artificial Sequence
  Synthetic
REEVEREVRKIEKLIRDSRERVRELIEKIERTLRDSERRVRELVKEVEKRLREIERKVE

SEQ ID NO: 16627 - protein, 56 aa, Artificial Sequence
  Synthetic
DVEKELKELHDKNEEILERARRLLERLHKENEEINKRVEEALRRLAEELRRLKEEL

SEQ ID NO: 16628 - protein, 59 aa, Artificial Sequence
  Synthetic
RREVKELIRKIDELLRRSKEEVDRLVKEVERLLRESKRRVEEVIEKLRKIIEELEREVR

SEQ ID NO: 16629 - protein, 56 aa, Artificial Sequence
  Synthetic
REVEEVIKDARRLLEELRKHSEDEVRKVEEEIKRLRDDNKRAVDDIERLLRELEEA

SEQ ID NO: 16630 - protein, 59 aa, Artificial Sequence
  Synthetic
RRAETKLEELRRRLDEILRTTEELLRRLKRELEKLSEESKARLDELKRKLDEILKETRR

SEQ ID NO: 16631 - protein, 57 aa, Artificial Sequence
  Synthetic
DEAREIVRELEKRIKDIEDRARKLIRELEKSLEDLKRRVEEMLREWEEESKELERRN

SEQ ID NO: 16632 - protein, 56 aa, Artificial Sequence
  Synthetic
REKVKEIKKRLDELLKRIEDELRRIREEDKRIHDEVEKELRKLERRDEELLKRLED

SEQ ID NO: 16633 - protein, 57 aa, Artificial Sequence
  Synthetic
SEAEDIVRKIEELLKRHHDRVEEMLRRWEELTRRHSEKAEKIVREVEKLIDELREAK

SEQ ID NO: 16634 - protein, 56 aa, Artificial Sequence
  Synthetic
EEEVKRLEKEIRDNLREMEERLKELEKRDKDNLDRIRELHRRLREELEKLLEDARR

SEQ ID NO: 16635 - protein, 59 aa, Artificial Sequence
  Synthetic
SMDELLKRLEEEDRKLNEESKETLERLRKHDEDLNRKNREKLKELKDRVDRVLEDAKKR

SEQ ID NO: 16636 - protein, 59 aa, Artificial Sequence
  Synthetic
EDDVRREVEDVKRRIEDSREKLRKLTEKWKKLNRESDEKVKKHVEDVEREIEKVRKEAE

SEQ ID NO: 16637 - protein, 59 aa, Artificial Sequence
  Synthetic
SSEEELKKLSDKARRLNDENRKILERLKEHDERLNKRNKEELKRLREDVERLLEDARRR

SEQ ID NO: 16638 - protein, 59 aa, Artificial Sequence
  Synthetic
EEDVKRKLDTIDKVIRDVRRRIEEHVRRWEELNRRSKKEIEDHVKTVEDVIKEAKDRID

SEQ ID NO: 16639 - protein, 61 aa, Artificial Sequence
  Synthetic
DEDEEVDREVREMIKRLEEHVKRDEDTLEEMLKRLRDHVERDRRRLEELLKDLERLVRERG

SEQ ID NO: 16640 - protein, 55 aa, Artificial Sequence
  Synthetic
EELKRLDREAEELLRRVDRLNEEVEKKLRKLLEEVRRENKRLEEEAKRLLDKAEE

SEQ ID NO: 16641 - protein, 61 aa, Artificial Sequence
  Synthetic
DEDEEVRKKVEEEIKRLKKEVEEDRRDVERLDEESKDKVRRDEKKVKDLLKELEDLVRRDG

SEQ ID NO: 16642 - protein, 55 aa, Artificial Sequence
  Synthetic
EELKRLEEEAKDLLRDVERLNRELHKRNREILEEATRRNEELKRELKELLDRARK

SEQ ID NO: 16643 - protein, 61 aa, Artificial Sequence
  Synthetic
SEEERVKEELDKAIKTLEKLVKDDLKKVADALRRLREHVEKDLRDLEEVLRELKELVDKTG

SEQ ID NO: 16644 - protein, 55 aa, Artificial Sequence
  Synthetic
EELKRAERELDRLLTEADRRNDELRREAERLLEKVNEDNRTVKERARRLLDDARR

SEQ ID NO: 16645 - protein, 61 aa, Artificial Sequence
  Synthetic
REDEEIVKEMERLLERLEELSRRIMEEVKRIDKESEDHIKRDEDKLREELERLRDLVRREG

SEQ ID NO: 16646 - protein, 55 aa, Artificial Sequence
  Synthetic
EELKELEERAKRLLERHERTNEELHRRNEEILRKANELNEEVRRRLDKLLDEVRT

SEQ ID NO: 16647 - protein, 61 aa, Artificial Sequence
  Synthetic
DREREVRRRVKEALDEIKRHVDRDRKKAEDMDRRSRELSDELRRRVDDLIKRLKELVDRDG

SEQ ID NO: 16648 - protein, 55 aa, Artificial Sequence
  Synthetic
EELDELRKELDKLLTEVDETNKKLHEDNKRILDDHDRINEELRRRMEALLREATR

SEQ ID NO: 16649 - protein, 61 aa, Artificial Sequence
  Synthetic
SEEEDMVRRVREMIKRLRDHVRRDKDKLDKEDKRSADHVDRDRKRLEDLLKELRDLVRDTG

SEQ ID NO: 16650 - protein, 55 aa, Artificial Sequence
  Synthetic
EDLKRLEKELRDLLDEVNKENEKVHRRNREILKRADELNEEAERRLRELLREAEK

SEQ ID NO: 16651 - protein, 61 aa, Artificial Sequence
  Synthetic
KEDEEVKDKVEKLIRKLEKESRDISEEVKRLDEESKKLARDLTEEVDRVIKRLRELVERDG

SEQ ID NO: 16652 - protein, 55 aa, Artificial Sequence
  Synthetic
EELKKLEKKLEELLERHRRDNKRLHEENRRILEELRRRIKELKERLRRLKEEARK

SEQ ID NO: 16653 - protein, 60 aa, Artificial Sequence
  Synthetic
ETDERLDELRRRLEKSLKDHKKLLDEVRKKAEELLDRNARLLEELKRELDELLKKVEEDN

SEQ ID NO: 16654 - protein, 59 aa, Artificial Sequence
  Synthetic
REVVEELLRRAEEEIRRHRKKVKESLDRLEDEIRKVEEDSRRSEKKVRKLIEDVKRRVK

SEQ ID NO: 16655 - protein, 59 aa, Artificial Sequence
  Synthetic
STEETLEKLDRDLKDSSRRNEELLKRVDDRLRESSKENRKILKELSDRLRDLLEKVKKD

SEQ ID NO: 16656 - protein, 59 aa, Artificial Sequence
  Synthetic
DKVVRELVKRAEDEIRDHKRLSKESLDRLDEEIKRHRELSKESMEEADRLIKTVKERVR

SEQ ID NO: 16657 - protein, 59 aa, Artificial Sequence
  Synthetic
ELDDLLREVEKRVRDLNRRNEEELRRVEDRMRESLRKSEEDLRRVEERLKKTLTRVKTE

SEQ ID NO: 16658 - protein, 59 aa, Artificial Sequence
  Synthetic
RRSAKKILDDLERTLEDVERRSRESVRRLREEIETHRKLVEELKKRLDDLEEEVKERVR

SEQ ID NO: 16659 - protein, 56 aa, Artificial Sequence
  Synthetic
SSDEILKRVKEELDRLLEENKRLLEEARKRLEDLIRKNREDLKRVEEKMRRLLEET

SEQ ID NO: 16660 - protein, 59 aa, Artificial Sequence
  Synthetic
EEVVRRLAEELRRLIEEVKRKIEESERRLKETLDRYRKLVEDSLRKLEETIRRVREESR

SEQ ID NO: 16661 - protein, 56 aa, Artificial Sequence
  Synthetic
SSEELLRKVKEDAKKIIKENEELLRKVDKDMRDIIKENRDLLEELTERVKRLLDRT

SEQ ID NO: 16662 - protein, 59 aa, Artificial Sequence
  Synthetic
EEVVKRILEELKKLLDEAERLSRESLKELEKMLREYRESVERSLRKVDDTLRRVEEKSR

SEQ ID NO: 16663 - protein, 59 aa, Artificial Sequence
  Synthetic
DDKRLLEEIRRRADELIKENEELLRRLEKLNEDLERRNKELNERLAERVKRLEEDVRRR

SEQ ID NO: 16664 - protein, 59 aa, Artificial Sequence
  Synthetic
RRIVEEEVDRVRKTIEELKRKSEDLVREHEEIVRDLERKSRELVKKVEKLLRDVRERAR

SEQ ID NO: 16665 - protein, 60 aa, Artificial Sequence
  Synthetic
SVDEMLKEIRDRAKKVDEDNRRLVERLEERNRELDERNKRLLDDIRRKVEEVMRIADERV

SEQ ID NO: 16666 - protein, 55 aa, Artificial Sequence
  Synthetic
KELVDRVRKLLEEVRRKSEKLVREHEDLVRRNEEHSRRLVEEADRILERAKRELD

SEQ ID NO: 16667 - protein, 60 aa, Artificial Sequence
  Synthetic
SVEEMLRRLRERDEEINDRLRRLAEDLKRENKRLDDENKKLVDEIREDVERLKEKLDRKL

SEQ ID NO: 16668 - protein, 55 aa, Artificial Sequence
  Synthetic
SELLKRWEELLRRLEKRIRDLVEDHKRLVEENERHSRKLVEEVKKALTDAEKKVE

SEQ ID NO: 16669 - protein, 60 aa, Artificial Sequence
  Synthetic
SVEELLEDIRRRVEKVKEDNKRMLEDLERKNRELKKEADDLAREIKKRVRDLEKELDEKL

SEQ ID NO: 16670 - protein, 55 aa, Artificial Sequence
  Synthetic
SKLVEEVRKLLEEARRESEELLRRHKKLVDDNRRHIRKLFEDVKKILDDARKEVE

SEQ ID NO: 16671 - protein, 61 aa, Artificial Sequence
  Synthetic
SEEEEIVKDVERVIRELEERHKDLVRRAREDIKRLREHIRRSIRALDEDIKRIEEKIRRDG

SEQ ID NO: 16672 - protein, 56 aa, Artificial Sequence
  Synthetic
EDLVRDLERKNKRVIDESRRLLEELRRRYEELLREYRELLEDLRRKYKRIEDEAKR

SEQ ID NO: 16673 - protein, 61 aa, Artificial Sequence
  Synthetic
SEKEEIVKTVKTVIDRLEEEHRKILEDLRDDIRRADEYIKRSIDEVEEDLRRIEETVRRDG

SEQ ID NO: 16674 - protein, 56 aa, Artificial Sequence
  Synthetic
ERLVRELEKENEKLKRRSERMLEELEKEYRRLLKKYEDLLRELERKYEEIKDKLRK

SEQ ID NO: 16675 - protein, 61 aa, Artificial Sequence
  Synthetic
SEDEDIVRKAKEDIERLKREVEETIKRVEDDARKVEKEVRDIVERTRKEIKKLEDEVRERG

SEQ ID NO: 16676 - protein, 56 aa, Artificial Sequence
  Synthetic
EKLVEELRRELEKLKKEIDDLLRDLEKKYDDIRKKIRKLSEELKKLLEELKRKLDE

SEQ ID NO: 16677 - protein, 61 aa, Artificial Sequence
  Synthetic
SELEKIVEEVRRDIKRVRERVEEIIRKTDEMIRRLEEHIKRSIERVRKDAEDIERTVRRDG

SEQ ID NO: 16678 - protein, 56 aa, Artificial Sequence
  Synthetic
KDLLDELRRRYEELEERIRRLSRELEEKLKKLRKRYEDLLEELEREYRRIAEEARR

SEQ ID NO: 16679 - protein, 61 aa, Artificial Sequence
  Synthetic
SEEEKIVEEVKRDIKKVDDEVKDIIRRTDKAIKDLRREHKELIDRTRKAIEELEDEVRKRG

SEQ ID NO: 16680 - protein, 56 aa, Artificial Sequence
  Synthetic
EDLVDELRKLYDTIREKIKRLSDRLREKNEKLKKESDDLSRRLRKELEKLEREVRR

SEQ ID NO: 16681 - protein, 59 aa, Artificial Sequence
  Synthetic
SKEELLKEIRDELRKLKKKHDDLLEEIKREYDRLREKVRKDLEDIERKLRKLEEDVERK

SEQ ID NO: 16682 - protein, 59 aa, Artificial Sequence
  Synthetic
EEEVKRVVERVKELIKRLEDNIREAIRKLREDIKRLEEEVEKARKDVEDFLRELRKKVK

SEQ ID NO: 16683 - protein, 59 aa, Artificial Sequence
  Synthetic
SSDELAEELKREYDRNKEEHKKLLEELKKEYKRLLDEHRDLLRRIKERLDRLLRRIEEK

SEQ ID NO: 16684 - protein, 59 aa, Artificial Sequence
  Synthetic
EELVERVIRDVRKHIEDNTENIRRDIERVRKDIETLEENVKDAAKKVEDILKTLEDEVK

SEQ ID NO: 16685 - protein, 59 aa, Artificial Sequence
  Synthetic
DKERLAEELRRLYERNKREHEKLLKKIEDDLRKLEEDHERLLREIEEAAERLRREIERK

SEQ ID NO: 16686 - protein, 59 aa, Artificial Sequence
  Synthetic
EELVKRVVDRVRRHIEENTKNIEEAIKRVEDVIRELRKNIEEAIKRVREVLKRLKDEIK

SEQ ID NO: 16687 - protein, 59 aa, Artificial Sequence
  Synthetic
SEDELLDRLREKYERNKERHKRLLDELRKRYEDLKREHEKLLRDIEEELKKLEDKIRRK

SEQ ID NO: 16688 - protein, 59 aa, Artificial Sequence
  Synthetic
EDLVRKAIEDVDRHIKENTKNIEDTIRKVKKNIEDLKRNVEEAIKKVKEVLREIEERTR

SEQ ID NO: 16689 - protein, 59 aa, Artificial Sequence
  Synthetic
SKEELLKRLKERNERLNEDSERLAREIKRRLEELRKEHRRLLKEIEERLKELEEDIRRK

SEQ ID NO: 16690 - protein, 59 aa, Artificial Sequence
  Synthetic
EEDVKRVIRRWEELLKELEKDNRRVVKEAKELIDRLERNIRERIKEVRDALREIRKKVK

SEQ ID NO: 16691 - protein, 59 aa, Artificial Sequence
  Synthetic
STDEKLKELEKRNRDLNEESRKLAEEIRKRYEDLKKEHEDLLREIEKRLRDLMREVERK

SEQ ID NO: 16692 - protein, 59 aa, Artificial Sequence
  Synthetic
EKSVDDVIRRWEELLEELRRRNEEAVRRMERNIDELRRNVRETIDRVRKLLEEIKRKVD

SEQ ID NO: 16693 - protein, 60 aa, Artificial Sequence
  Synthetic
SEAERVVEELERLLKKNRDDNERVIRRLEELLDRLREKNERAIEELRKLLDELKKVVDRG

SEQ ID NO: 16694 - protein, 56 aa, Artificial Sequence
  Synthetic
RELLREIEERLKTLSEESKRLIDRIREELKRLTKESEDLLKDIERLLREVKERART

SEQ ID NO: 16695 - protein, 60 aa, Artificial Sequence
  Synthetic
DEMEDLRRDVERIHEESRKLSEDSVRTAEKIHRESEKLIDDLRRKVEKILKEVEDVVRRG

SEQ ID NO: 16696 - protein, 56 aa, Artificial Sequence
  Synthetic
EEELKKLEDRSRKLLEENKRLNEDLDRRSEELKARLKDILRRIDERLRDLEREADR

SEQ ID NO: 16697 - protein, 60 aa, Artificial Sequence
  Synthetic
DEVEELKRRAEEILRKYDEDSKRIVEEAERIVRTSAEKIERLRKKAEDILREASKVVDDG

SEQ ID NO: 16698 - protein, 56 aa, Artificial Sequence
  Synthetic
ERDLEKIETDVERLERKSKKLLEDLREKSERLKKRLEDILKRIKEEVERLKRKVEK

SEQ ID NO: 16699 - protein, 59 aa, Artificial Sequence
  Synthetic
DEMEELKKEVEEILKEYEKRSRDLFKELKEILRRSKELSEDSKREADKILRDAEKVVAD

SEQ ID NO: 16700 - protein, 56 aa, Artificial Sequence
  Synthetic
EDDLRRIEEKVKKLEKESRELLKRIKDESEELKRDNKRLNDEVREELEKLKERVRK

SEQ ID NO: 16701 - protein, 60 aa, Artificial Sequence
  Synthetic
DEMDELRREVKEILKTTEELIKRLEDKVRDILRRYKEVSDDIVRKAEDILRKAEDILRRG

SEQ ID NO: 16702 - protein, 56 aa, Artificial Sequence
  Synthetic
ERELEEIKKESEDLERRLKKVLERIEREVRRLEEETKELLKRIAEEVERLIREAEK

SEQ ID NO: 16703 - protein, 60 aa, Artificial Sequence
  Synthetic
KEAEDLVREVERILEDYDRVVKELKDDADRILEESRRLIEELKKKAEDILRRVRKVVEDG

SEQ ID NO: 16704 - protein, 56 aa, Artificial Sequence
  Synthetic
EELLERIKDRLRKLHEKSKKLLTDIKRESRRLEKRLEDILKRIKEEADKLKEEADR

SEQ ID NO: 16705 - protein, 59 aa, Artificial Sequence
  Synthetic
REEELERRVREESEELNRRLAEVHKRLRKKSKELNDRHKELDDRIRREADRLRKDIRRQ

SEQ ID NO: 16706 - protein, 55 aa, Artificial Sequence
  Synthetic
DEVLKELKEMHDRLREHVKRDSERAERMHEELKRLSDELERRVREALKRLKEKVR

SEQ ID NO: 16707 - protein, 59 aa, Artificial Sequence
  Synthetic
KKEEVRKRIEEELRRLKKDHRRLDEEIKRKLKKLDEEIKEVHERLKKAARDLEDEARRN

SEQ ID NO: 16708 - protein, 55 aa, Artificial Sequence
  Synthetic
KEVEKDVEDLLKELEDDSRRLEEEVERLIERVKRHVERDERRVREMLREIKEKIK

SEQ ID NO: 16709 - protein, 59 aa, Artificial Sequence
  Synthetic
SKEDLDRELRRLSEELNREHKELDERIRRELEKLRTRIDKVHEDIRREMKRLEDEVRKR

SEQ ID NO: 16710 - protein, 55 aa, Artificial Sequence
  Synthetic
EEVFEDAERLHRELKKKSRDLEERVKKLLEEIEDHVRRDETRVRKVLRDIEEDIR

SEQ ID NO: 16711 - protein, 59 aa, Artificial Sequence
  Synthetic
SKEDMLREAEERSRRLNEDHKRLDDELRKESEKLNRRHRDLDEKIDRELRRLKKDIRRR

SEQ ID NO: 16712 - protein, 55 aa, Artificial Sequence
  Synthetic
RELLERLRKVHEDLKKKSEDLKRTAEKLHRELEKESRDLVRDVERALDELRRKVE

SEQ ID NO: 16713 - protein, 60 aa, Artificial Sequence
  Synthetic
SSEELLRDIERRLEEMNRDTERVVEEIRRRLEELRKRHKETIDKIREELKKVEDLVRRRG

SEQ ID NO: 16714 - protein, 55 aa, Artificial Sequence
  Synthetic
EDVLRRAKRLIEKYKEDTKRIKEKLEKVIEDLRKNIEDFEEDVRRVLEELKKRIK

SEQ ID NO: 16715 - protein, 60 aa, Artificial Sequence
  Synthetic
SSRELLERIKEELKELEDRHRDLLRRIEEKLERLNRRTREVLERIKRKLDELKKRVEEAG

SEQ ID NO: 16716 - protein, 55 aa, Artificial Sequence
  Synthetic
EDLLREVKELIERLRENIKRAKDKVEELIKKYKRDTDEAKKEVDEEIKRLKEEVD

SEQ ID NO: 16717 - protein, 60 aa, Artificial Sequence
  Synthetic
DSERLVREIRERLKKLEKEHRELLEEIKDRLRRLNEESKKLLDDIKRRLEELRDRIRRAG

SEQ ID NO: 16718 - protein, 55 aa, Artificial Sequence
  Synthetic
EDVLRDLEKLIEDLKRNIERARAKVEKLIKEYEDKLEKIVRDAEELIKDLDRKVK

SEQ ID NO: 16719 - protein, 59 aa, Artificial Sequence
  Synthetic
SSEEILRKIEEELERLEREVRKIHRDNERKSEELNRRSKKILDDIRRELDRLKKEAEEK

SEQ ID NO: 16720 - protein, 55 aa, Artificial Sequence
  Synthetic
KEVVKEMRRALEEIKKEIEKVRKELEKRNREYRKRSEEVREEAERKLEEIKRRTD

SEQ ID NO: 16721 - protein, 59 aa, Artificial Sequence
  Synthetic
RSEEILREIRDRLRKLNEESEKVHEENERRSRELNERSREILKRIDEELKRLKKEVDDK

SEQ ID NO: 16722 - protein, 53 aa, Artificial Sequence
  Synthetic
VVRDLKKKLERYKRETDRVRKELRDLNKKYEDRSREIKRELERLLRDIKRRID

SEQ ID NO: 16723 - protein, 59 aa, Artificial Sequence
  Synthetic
SLEEVIKTVRKLLEEVERRLREVVERAERMLEEVRRRTREVSEEAREMLKDVEKALRDK

SEQ ID NO: 16724 - protein, 59 aa, Artificial Sequence
  Synthetic
DRIVEKLLRDAERIVKRLRELIEKLREEVEKIVDENRKTVEELRRRNEEIVRRLRREIE

SEQ ID NO: 16725 - protein, 60 aa, Artificial Sequence
  Synthetic
DVKEVLDDAERKLREVLKLIEDSLKKLKELSDEVIERIARSLEKLEKLIRDVDEELKRKV

SEQ ID NO: 16726 - protein, 59 aa, Artificial Sequence
  Synthetic
KEVVKEIKERVDKVVDEARKLVEESERSIRELVERSKKVVEESERSIEELRRELKETVK

SEQ ID NO: 16727 - protein, 60 aa, Artificial Sequence
  Synthetic
DLEEVRERARRLLRKLEEDLERVHKEMEELLRELEERIKASLERLDELLKRLADKLRRDV

SEQ ID NO: 16728 - protein, 59 aa, Artificial Sequence
  Synthetic
KEVVKEIEDRVRKVAEKVREVIERNRKLVRDVLDKIRRMLKESERSVEEVLKRLDDELK

SEQ ID NO: 16729 - protein, 60 aa, Artificial Sequence
  Synthetic
SLDEVVKRLEDLLREVEEKSKESSKRMEDLNREVNERLRRSSERLKRLNDEVKKRLEDAG

SEQ ID NO: 16730 - protein, 56 aa, Artificial Sequence
  Synthetic
VEEIKKLADKVVTELEKLVEDDRRLAEESFERARKIVEEDERLARESVDRARRLVD

SEQ ID NO: 16731 - protein, 59 aa, Artificial Sequence
  Synthetic
KLDEVIEEIRKLLRRMEEELRRSVEEIDKLLREVRELLRESSEKVKELLRRVTEELKKR

SEQ ID NO: 16732 - protein, 58 aa, Artificial Sequence
  Synthetic
KLVEDLKRRAEEVIRELREIVKRNTEIAREVVERAKRIVEKNEKLLKDVVEEAKKIVK

SEQ ID NO: 16733 - protein, 56 aa, Artificial Sequence
  Synthetic
SELEKAKEDVDRLLEDVNRVSEEVEDRVRKLLADSDRVLEEVERRVREVLKRLKDA

SEQ ID NO: 16734 - protein, 56 aa, Artificial Sequence
  Synthetic
VKTVADELRKVVKELLEINRRSLEELTKLVDESRRVNEKVMEELKKLVDDLRRRIE

SEQ ID NO: 16735 - protein, 58 aa, Artificial Sequence
  Synthetic
SEIEKVKEVVREVIERSRKLLKEVRDTVEKVIDESRKLSDTVRRRVEDAIRDVLERRG

SEQ ID NO: 16736 - protein, 59 aa, Artificial Sequence
  Synthetic
REEVKKVIEDLTREAKRSLERNREVVKELKKLADDLKDLNKKSVDRLDDLVRRLKERTE

SEQ ID NO: 16737 - protein, 60 aa, Artificial Sequence
  Synthetic
KRAEDVLEKLREDAKRVLKRNRDSVKEAEDLVRKSLRTSEEVVKTLRTELKKLLDELDRV

SEQ ID NO: 16738 - protein, 59 aa, Artificial Sequence
  Synthetic
EKVLRDIEREVRKIIKELEDMDDELRRILEEVIERSRRVNERLKELLKEADDRLREKLR

SEQ ID NO: 16739 - protein, 59 aa, Artificial Sequence
  Synthetic
DAAEELLRLVEDVARELKRLVDELLKENRETVERLKKVVKRSEEINREVVRTLRELVAN

SEQ ID NO: 16740 - protein, 58 aa, Artificial Sequence
  Synthetic
EKIKEVRRSIEEARRRVEEALREVNEASKEAERTVREALKRSREAVEKAVRDVTEAAR

SEQ ID NO: 16741 - protein, 56 aa, Artificial Sequence
  Synthetic
KELEDVLRESEKTAEELLRRVKKSIDRTRDVVRRLLEEIRKSIEETKRVADEAKRE

SEQ ID NO: 16742 - protein, 58 aa, Artificial Sequence
  Synthetic
DLVRRLERISEEVRRRVEKLVREDRKILEDVARALRELVKEDEEILRRVVKDLRDKTR

SEQ ID NO: 16743 - protein, 59 aa, Artificial Sequence
  Synthetic
DEDKKVVRKVERIIKRVKELHDKSVRDSEEVVREVLKRHKESVEKIKEIVRRIVEIAAR

SEQ ID NO: 16744 - protein, 55 aa, Artificial Sequence
  Synthetic
EELKEVIRRVEKLSEDVKRENEKSNDEVRKLSEDAIRENEEVLRRARKLVDDLRR

SEQ ID NO: 16745 - protein, 59 aa, Artificial Sequence
  Synthetic
DEEKEVVKKLRDIIREVERLHTESVRKVEEIVRRVLRLHKETVRELKEIVKRIVDIARN

SEQ ID NO: 16746 - protein, 55 aa, Artificial Sequence
  Synthetic
RELEKVAKEVEDRSKELLDRNEEVLDRVRKLSEDVLRENREVIERVREEVKKESK

SEQ ID NO: 16747 - protein, 59 aa, Artificial Sequence
  Synthetic
SEADKVVAELEKIVKDVVDAHKDSVRKLREIVRRAVERLRKDVDDTRRVVKEIVDIARS

SEQ ID NO: 16748 - protein, 59 aa, Artificial Sequence
  Synthetic
ERVRRKLEEVVKKVRDLSRRATEEVEEVIKEVRELVRRLKEENKRVVDEVRKRVEDTRK

SEQ ID NO: 16749 - protein, 60 aa, Artificial Sequence
  Synthetic
KSMEDVVRKLDELVKTDKEIADRVVKELKDIVKRVEELVEDIVTKSRASVERVRDVVTRG

SEQ ID NO: 16750 - protein, 59 aa, Artificial Sequence
  Synthetic
REAKELLDRLKRRLEKSTEEVKKKLETVLRELEEVIKRVKEELERVNRELRKVIEDAKK

SEQ ID NO: 16751 - protein, 59 aa, Artificial Sequence
  Synthetic
ELEKLIRDVVRENEESAKEAHRRIKEVVRTSEDLVREVRERVRRIVESSKRVVEEVRKK

SEQ ID NO: 16752 - protein, 56 aa, Artificial Sequence
  Synthetic
MEKLLRDLKKLIEDNERVVRELKKNLDDDSERVKRVADELLKNLKKDTKKVKDTAK

SEQ ID NO: 16753 - protein, 59 aa, Artificial Sequence
  Synthetic
DEAEDVVKRADDIVKRNRELLERVVRDLERIVRKNKDIVRKVVDEAKKLVKTVEDLSRQ

SEQ ID NO: 16754 - protein, 59 aa, Artificial Sequence
  Synthetic
KEVEDLLRRVEEKLRKSVKEVEELLDTVRRRLEDSSRDVKRLLKEVLDRLEDVLDKEEK

SEQ ID NO: 16755 - protein, 59 aa, Artificial Sequence
  Synthetic
SAVEEADKEVRRILKKNTDLVRRVVEEAKKILDRNEKRVREVFKELTRLLDELRKLIEE

SEQ ID NO: 16756 - protein, 59 aa, Artificial Sequence
  Synthetic
EEVERLLRELERRLEDSVRKARELLKDIERRLRESIKRSEELLRDVERRLKELEERLEE

SEQ ID NO: 16757 - protein, 60 aa, Artificial Sequence
  Synthetic
DVEEELKRVVEKLRDVERKVRELNKRVTDKNEDVVRTVRELNERVTRENRRVVEDIDRKK

SEQ ID NO: 16758 - protein, 56 aa, Artificial Sequence
  Synthetic
LDDVLRRLEELVKDLERLIEESVRYLERNVERSRELVERSLRYLKENVDRSRKLAE

SEQ ID NO: 16759 - protein, 59 aa, Artificial Sequence
  Synthetic
DEVREVVERARKLVKDNLDAARKAVKRLRELVKENLDTVRDVVRKLRKLVEDLKRLIRS

SEQ ID NO: 16760 - protein, 56 aa, Artificial Sequence
  Synthetic
KELADEVRELAKRSHEELKRLLDEVRKLLKDSERALRKLLEDVRREADKVAEEVRT

SEQ ID NO: 16761 - protein, 59 aa, Artificial Sequence
  Synthetic
SEVDEVVRRARELVKKNRDDVKKVVEDLRRIVKEDLDTARRVVKRLRELVEELKELIRS

SEQ ID NO: 16762 - protein, 56 aa, Artificial Sequence
  Synthetic
KELADEVDELMKDSDRELKRLLEEVRKLAKRSTDELERLIEEVRKELEDVLDEARQ

SEQ ID NO: 16763 - protein, 59 aa, Artificial Sequence
  Synthetic
SREEELLERLRRVVERNKKLVDDLADRADKVVKENEKLVRDLLEESRKTSEILDRLVKN

SEQ ID NO: 16764 - protein, 54 aa, Artificial Sequence
  Synthetic
LVEEVRRLSEKSNRDLKELVKDIERKLDKVHKDLEKVIEEVERSNERVKEEVKT

SEQ ID NO: 16765 - protein, 60 aa, Artificial Sequence
  Synthetic
SDAERIVEEAKRLVEENTELVERVLEKLERLVRENRTLVERVIEELDDLVRRIEDVVRRG

SEQ ID NO: 16766 - protein, 59 aa, Artificial Sequence
  Synthetic
KKLEKLLREVERLMEESHKRLKEVADTARRLMDDSERELDRLLREAEKKIRDVREEIRR

SEQ ID NO: 16767 - protein, 59 aa, Artificial Sequence
  Synthetic
SLVDEILKDLDRLVEENEKLVKKIVEDAEELVKRNTDLVEEVLRELKEIVETIRDLVRR

SEQ ID NO: 16768 - protein, 59 aa, Artificial Sequence
  Synthetic
EELKDVLRRVEEKIRKSNEKLEKLLEEVSRLAKRSDERLKKVLEDIKEEIRKVKEDLER

SEQ ID NO: 16769 - protein, 59 aa, Artificial Sequence
  Synthetic
SLEEVVKKAEDLLKRVNDELKKVSKKVRDDLRRVNEKLKTVVEDVLRKLEAVVDKIRKS

SEQ ID NO: 16770 - protein, 56 aa, Artificial Sequence
  Synthetic
VKDVDKRIRDVVRRHEEVVETNARRVDEVVKRHDKLVKDLERRVEKVVRELEEKVR

SEQ ID NO: 16771 - protein, 59 aa, Artificial Sequence
  Synthetic
SLDEIVKRAEEELKRLNEELKRVSDRVKERLDRVLDELRRISERIKELLERVKRKLERE

SEQ ID NO: 16772 - protein, 56 aa, Artificial Sequence
  Synthetic
AEDLRREVEEIIRRHKEVIRKNEEDVKRVLDTLREMLKKNKKLVDDMVRKLDETIK

SEQ ID NO: 16773 - protein, 55 aa, Artificial Sequence
  Synthetic
SEAEKVLEKVERVAREVLERIKRIVEHTKRVVEDVIRRADESVRRSEEIMEDVRR

SEQ ID NO: 16774 - protein, 56 aa, Artificial Sequence
  Synthetic
KEDVERLVRTVKEELDRLVDESRKLSRDVRETLEELVKRSEDVTRRVEETLREIVK

SEQ ID NO: 16775 - protein, 56 aa, Artificial Sequence
  Synthetic
DELERILEEVKKVVEEVVRRAEESVKKTEDVMRKVVERVARSLEESRRVAEEVERR

SEQ ID NO: 16776 - protein, 56 aa, Artificial Sequence
  Synthetic
EKDVKRLVDEVRKELEELVRRSEELTKEVKKTLEELVKESKEVVKDVEKKLREIEK

SEQ ID NO: 16777 - protein, 57 aa, Artificial Sequence
  Synthetic
REVDEAVKNNEEDAKESRRVVEEAVKRDEDIARDIERRAREVVERDKEIVDEVRRRV

SEQ ID NO: 16778 - protein, 60 aa, Artificial Sequence
  Synthetic
SKEVKDLLDENSKRSNEISREVKKDLERTVRENKKIVDEVRKKLEDTVDKNRRIVEEVTT

SEQ ID NO: 16779 - protein, 57 aa, Artificial Sequence
  Synthetic
SEVDKMLKRSNDIVREIARVVEEAVKTDERIMREILEHARKVVEEDKEIVDRVRKEV

SEQ ID NO: 16780 - protein, 60 aa, Artificial Sequence
  Synthetic
SEEVVRRLRTLVEENRKIVEDVKRELERTVRDNRRIVEEVAKRNHDTVRENKEIVDRVKT

SEQ ID NO: 16781 - protein, 57 aa, Artificial Sequence
  Synthetic
KEAEDVIELVRRILEEVDRRVRDVLRKDEESLRRVKKTVEEVLKRHKDIEDEVRRRV

SEQ ID NO: 16782 - protein, 60 aa, Artificial Sequence
  Synthetic
SEEVKRVLEEIVKKVEEIVKDVERKLRKTVEENEEVVRRVKRYLEKSVEDLEKVVRDVTT

SEQ ID NO: 16783 - protein, 56 aa, Artificial Sequence
  Synthetic
SAEDILREVEELVRRTRKHLEDSLREVTKLVEETKREADRILKEVRDRVKEVIERG

SEQ ID NO: 16784 - protein, 59 aa, Artificial Sequence
  Synthetic
EEVLKTVREELRDIIRRSVEHNRDSLRRLREIIERSLRHVEEVLERVRKEIERIKRETK

SEQ ID NO: 16785 - protein, 56 aa, Artificial Sequence
  Synthetic
SAEDILREIKRLVEETERLLKRILEEVRKLVEETRRRLETILRRVEEKVRRLVEKG

SEQ ID NO: 16786 - protein, 59 aa, Artificial Sequence
  Synthetic
EETLKRALDEARKIIEESKKHVKDVLRKVTDEIRESKKDVERVEDEVDKRIREVDERTK

SEQ ID NO: 16787 - protein, 60 aa, Artificial Sequence
  Synthetic
SIDEVAEEVERLLEEVKETSREVLERVKRELEKIIDTSRRILEEVRRLLERVLEEVERRK

SEQ ID NO: 16788 - protein, 59 aa, Artificial Sequence
  Synthetic
DRDVKRVLDKVRKKIEENKDTVRRVEEEIKKLIEDNKRTSEKVRKEVTDIIEEIKEEIK

SEQ ID NO: 16789 - protein, 56 aa, Artificial Sequence
  Synthetic
DVEDVVREAEDLLRKLEEKSRKVVEDAKRLLDEVKRKMEESVKEAKRLLDEVLRKS

SEQ ID NO: 16790 - protein, 59 aa, Artificial Sequence
  Synthetic
KKIVEEVRRRVEEVVRRDEKSVEDLKREVDRVITELDRLVKRNTEEVERVIRRLDEETR

SEQ ID NO: 16791 - protein, 60 aa, Artificial Sequence
  Synthetic
SEEEDAERLLRDLKRRADEVVKESEKILEDIVRDAERVLRESKRISEEIVRRADEIRRKV

SEQ ID NO: 16792 - protein, 55 aa, Artificial Sequence
  Synthetic
RLVEELRRLVEEVRERLDRSVKKTKELLKEVIKELEKLLKKDEDDVERVIRRLED

SEQ ID NO: 16793 - protein, 60 aa, Artificial Sequence
  Synthetic
SEVEDILRRVEKRARDSLKHLEDVLRKVDKRVRESLDNLRRVLEEVERIVRELERLLDEG

SEQ ID NO: 16794 - protein, 59 aa, Artificial Sequence
  Synthetic
ERLLEEIVRRLEDSLRKVEEIARRIEKRLRDSLRETKRIADEIRKRLEDALRRVEERAR

SEQ ID NO: 16795 - protein, 60 aa, Artificial Sequence
  Synthetic
SDVEKILDDVRKDAERSLENLKEVLEKVEEEVRRSLEDLRKVLEDVERIARKLEELLKEG

SEQ ID NO: 16796 - protein, 59 aa, Artificial Sequence
  Synthetic
EELLRRIERTLRESLEAVKRIAEEIERTLEESLREVERIVKEMEDLVRAALKRVEDKAR

SEQ ID NO: 16797 - protein, 60 aa, Artificial Sequence
  Synthetic
SEVEEILRRIKEEVRESLEDLRRVLEEIEKKAKESLRELKEVLERVKEIADKLKRLLDEG

SEQ ID NO: 16798 - protein, 59 aa, Artificial Sequence
  Synthetic
EKLLRDIKRDLERSLEAVDKIVKEIMERIKESLKATERIVKEMKDLITRVREEVKRRAE

SEQ ID NO: 16799 - protein, 56 aa, Artificial Sequence
  Synthetic
DEVEELKERAKRSNEELKRKVEELKKRAKKAIDDVRRVVDENKKLVKEAIDRLRKT

SEQ ID NO: 16800 - protein, 59 aa, Artificial Sequence
  Synthetic
KETLKKLLEELKKLVDESRRRLDELRKEVEKKVEEMLERARRLLKKTEDLVREVKRRVD

SEQ ID NO: 16801 - protein, 55 aa, Artificial Sequence
  Synthetic
DELKELEDRLRRAEEEARRLLEEIKKRLKESNEELKRLVEENEKLVKEALRRLEN

SEQ ID NO: 16802 - protein, 59 aa, Artificial Sequence
  Synthetic
KDVLRKLLEEVERLVKRVLDELRALLKEVEDLVRKSVEDLRKLLEETRKLVREMEERVR

SEQ ID NO: 16803 - protein, 55 aa, Artificial Sequence
  Synthetic
SLVEKLEKRLRDVIKTIEDIIRENEERLRRSNRELEKLVDENRKLVEEVLKRLAD

SEQ ID NO: 16804 - protein, 59 aa, Artificial Sequence
  Synthetic
ERVLEKLLREVEELAKRVLTELRRLLRETERLVRESEKRLRDLLRDTERLAREVEKRVE

SEQ ID NO: 16805 - protein, 55 aa, Artificial Sequence
  Synthetic
SLVEDLKRELEKAKEEIEKIVRDLERELDRVIKENERLIRENEDTVRKALERLRR

SEQ ID NO: 16806 - protein, 59 aa, Artificial Sequence
  Synthetic
EDVLRELKDRVRRIVEEVARRLEELLKKVKDLVKKSLKTNEDLLRKTEELVRRAEERVK

SEQ ID NO: 16807 - protein, 60 aa, Artificial Sequence
  Synthetic
SEVEEVLKRLKELVDTVLEELKDVIRRIEELLERVRRDNERTIREDEELVRKVLDELRKI

SEQ ID NO: 16808 - protein, 56 aa, Artificial Sequence
  Synthetic
AEEIERVIREAERRLKKLLDELRRLVEEVRRELEELDERLKRSSEEAKKRLDELVK

SEQ ID NO: 16809 - protein, 60 aa, Artificial Sequence
  Synthetic
SEVERVLEDLRRLVRDVEEKLRRIIERDRRLVEEVERENRKTIRKIEELLRKVLEELKDI

SEQ ID NO: 16810 - protein, 56 aa, Artificial Sequence
  Synthetic
AERIEDVVREAEKRLRELLKELEKTSRDLKKRLEELDRELKALVEKVERDLEELRK

SEQ ID NO: 16811 - protein, 60 aa, Artificial Sequence
  Synthetic
SEAEELLRRLKELVDEVLKRLRDMIKRSEDLARDVLRKHEDLIRKLEELMKKVEDLADKI

SEQ ID NO: 16812 - protein, 59 aa, Artificial Sequence
  Synthetic
EEVVREIERIVREVTERLRRLVEENAEVVKRVEKELKELNDELRRVVEEIVRKAKEKTK

SEQ ID NO: 16813 - protein, 60 aa, Artificial Sequence
  Synthetic
SEAEELLKRLEDRAEEILRRLEEILRTSRKLAEDVLRELEKLLRESERRIREVLEELRRI

SEQ ID NO: 16814 - protein, 59 aa, Artificial Sequence
  Synthetic
KEVVDEIKRIVDEVRERLKRIVDENRKIVEDARRKLEKIVKENEEILRRLKKELRELRK

SEQ ID NO: 16815 - protein, 60 aa, Artificial Sequence
  Synthetic
DMRKELEKRVEEIRRAVTELVKRNEDIVREVKKRVEELVKRNEDITKKAEDDIRDLVRKR

SEQ ID NO: 16816 - protein, 59 aa, Artificial Sequence
  Synthetic
EEKLRRLLERLEDIARRVLKYLEEDLRETEKLAKEVLDRARKILEETKELVKDVLEKAR

SEQ ID NO: 16817 - protein, 60 aa, Artificial Sequence
  Synthetic
DMDEELRRVVKEIEDELRRLVEENRDVVRKVEKLNRDLLKRNEDITDEARKRVEDLVRKR

SEQ ID NO: 16818 - protein, 59 aa, Artificial Sequence
  Synthetic
REKLEKLIRRLREIAKEMLEYAKRDIERTKELAKRSLERHKESLDRTEKLVKEVLDKAR

SEQ ID NO: 16819 - protein, 60 aa, Artificial Sequence
  Synthetic
DMVRDLERIVEKIKEDIKELVKRNREVTEKVVRDVEELVKTNREVVREATRRVEKLVEEE

SEQ ID NO: 16820 - protein, 59 aa, Artificial Sequence
  Synthetic
EDTLRKLLKTLRELARRVLEEARKIIERSKELAERVLRYLKRDIEESKKIVKEIEDRAR

SEQ ID NO: 16821 - protein, 60 aa, Artificial Sequence
  Synthetic
DMERELDDVVRKAEEDNRRLLKENEDIVREVVDRNARLLEENRRVVEEAVRRVEDMLRRR

SEQ ID NO: 16822 - protein, 59 aa, Artificial Sequence
  Synthetic
ERKLRKLIDDLRKLVRESLEYNKDDLEKTKELARRSLKYNKEDIDRSREIVRDVRRKAQ

SEQ ID NO: 16823 - protein, 60 aa, Artificial Sequence
  Synthetic
SVIEALEEIAEKIERDVRKLVEENREVVKEAEKRVEEILRTNSKRSEEVRREVEDLVRKD

SEQ ID NO: 16824 - protein, 59 aa, Artificial Sequence
  Synthetic
ERVLEELLRRLEEIAKRALEYLTRDIEETKRLVEEVLKRLKEILDKTDDLAREVLERAR

SEQ ID NO: 16825 - protein, 60 aa, Artificial Sequence
  Synthetic
SEVEKIEEDLKRLVKRLREINEESKKRLEELIRTAEEINKKTTDELERLAEEVDRLVKRV

SEQ ID NO: 16826 - protein, 59 aa, Artificial Sequence
  Synthetic
REAVDRLRRVVDEIRKEARKLNEEIRKRVEDVVRKLDKMDEDLRKRVEEIERKVREATR

SEQ ID NO: 16827 - protein, 60 aa, Artificial Sequence
  Synthetic
SEVEEILERLRRLVKEVDKRNTDSLDTLKRLIDELERKNRDSLRRVDELAKELEKLARRV

SEQ ID NO: 16828 - protein, 59 aa, Artificial Sequence
  Synthetic
KDAVTELEKDVREIKKRLDEMDKRLKDVVDEVRRRAEEVNRRIERLVREIEKRAREEVR

SEQ ID NO: 16829 - protein, 60 aa, Artificial Sequence
  Synthetic
SEAEEVLERLKRLRETVKEENDDSLRKDRELVDRLEKDNRDSLRKLKELIERVREILKRV

SEQ ID NO: 16830 - protein, 59 aa, Artificial Sequence
  Synthetic
KDVVETVKRVVEEIEKELEEANRRLEKSSREVEDRIRKANKRLEEVVDEVREEVDKATR

SEQ ID NO: 16831 - protein, 60 aa, Artificial Sequence
  Synthetic
DEVREVLTRLEELVRRVTKELEDSLRNTERVRRTIRKLAEEVNRDSKRLKDEVKKVLEKI

SEQ ID NO: 16832 - protein, 59 aa, Artificial Sequence
  Synthetic
EEAVETLKRKVEEIERRLKRMVEEDRKTIEEIEEEVRRLVKTNREIIKEIVETLREAVR

SEQ ID NO: 16833 - protein, 60 aa, Artificial Sequence
  Synthetic
KEVEEVRTRLKKLRDDVKRLLDEVNEESKRLAEEVRRRLEESNRNTERVVEEIERVIERI

SEQ ID NO: 16834 - protein, 59 aa, Artificial Sequence
  Synthetic
DKVVDEVRRRVEEAEREVKDMVRTNNEIVRRIVEEARRLVDEDRDRIKKIEERLRRELQ

SEQ ID NO: 16835 - protein, 60 aa, Artificial Sequence
  Synthetic
SEAEEVLREVDELAKRLERVATESLKNTKKVVDDVRREVKRVNERSEEIMRRIEDVLRKI

SEQ ID NO: 16836 - protein, 59 aa, Artificial Sequence
  Synthetic
EELIREIERIVREIDKRARELVERDNREVERIVEELKELVKTNNDIVRRVVEKLKETVR

SEQ ID NO: 16837 - protein, 58 aa, Artificial Sequence
  Synthetic
SEAEKILEDLKRIVRRIKEELRRVLDHTRELVERIRRLAKKILDDTEKIVRDIRDKAE

SEQ ID NO: 16838 - protein, 59 aa, Artificial Sequence
  Synthetic
EDVVRELKREVERIKREVKKMVDDNRRTVEKIKRDAEKMVRDNEELSRRIEKDVDDKTK

SEQ ID NO: 16839 - protein, 58 aa, Artificial Sequence
  Synthetic
SEAEKIEERLKRVVEKLRRDATRVRKHTDDLVKEITDLAEESKRRVEEIRERVKRLRE

SEQ ID NO: 16840 - protein, 59 aa, Artificial Sequence
  Synthetic
EKVVKRLEDEVKRIKDEAKEMVDENKRKVDEIRKELRRLVEENRRESEKIKKKLDEDLK

SEQ ID NO: 16841 - protein, 58 aa, Artificial Sequence
  Synthetic
DEIREILRRIREVVADATRRAKESLDNLKRVVEEVDRRVKESLDRLKEIVDRVRELSK

SEQ ID NO: 16842 - protein, 59 aa, Artificial Sequence
  Synthetic
KDVVKRVEDEVRDIRRVLEEMVRRDKKVVDEIRERLKEAVRRNEEVSRKIKKDLKDETK

SEQ ID NO: 16843 - protein, 57 aa, Artificial Sequence
  Synthetic
SMEERLREVVTEIRKKVEKLLRDNRKSNKEIKETVDDLVRRNRELTERAKRRVDARG

SEQ ID NO: 16844 - protein, 59 aa, Artificial Sequence
  Synthetic
EREAEELLRELADVVRRAEELAERSLRESEKVMEDITREAERILRDTKRLIEEIERRAR

SEQ ID NO: 16845 - protein, 57 aa, Artificial Sequence
  Synthetic
SLREDLEKDVRDIVREIDEAVERNRRSVEEVDKRVEDMLKNNRDSNKKIEEDVRRAG

SEQ ID NO: 16846 - protein, 59 aa, Artificial Sequence
  Synthetic
EEDAKRLKDELREVVDKIRRDLKKSNDDIRRLVEKIKRELEELNKRSRELVERARETVR

SEQ ID NO: 16847 - protein, 57 aa, Artificial Sequence
  Synthetic
SLEETIEEKVRRIREEVRRMLENNRRINEEVDRRVTEMVERNRKTVEEVVREVDRDG

SEQ ID NO: 16848 - protein, 59 aa, Artificial Sequence
  Synthetic
EEDAKRLLEEVEDIVRRLRKELEDSNRKSRKLVEEIRKRAEESNRELRELIKRIKDRAR

SEQ ID NO: 16849 - protein, 56 aa, Artificial Sequence
  Synthetic
DVLERLAEVVRRVVKEAEDLVRNNRRLNKEVEDEVDELVRNNRRLTKDVVKKVEDA

SEQ ID NO: 16850 - protein, 59 aa, Artificial Sequence
  Synthetic
KEEVKRLEDELRKVVDKVRKDMKRSNDDSERLREDITRKAKRLNEETRKVMEDVTRRAT

SEQ ID NO: 16851 - protein, 60 aa, Artificial Sequence
  Synthetic
KEAEELIREIERKAEEVRKENERSIRENERLAREVEKRLKRTNEELKRLVRELEEKLKRD

SEQ ID NO: 16852 - protein, 59 aa, Artificial Sequence
  Synthetic
EELIRRLEEVVKRIREDLKKLDDDLKRSVEEIERRLKKVIEDNRETLERARRRLDERVK

SEQ ID NO: 16853 - protein, 60 aa, Artificial Sequence
  Synthetic
DEAEEILEELRRLIEEDKKTVEEVLRRDEETIKRLEEENREALKDNRRLIEELEDIVRRI

SEQ ID NO: 16854 - protein, 59 aa, Artificial Sequence
  Synthetic
EKVREKVERILDDLRRVVEETVKRAEDLLRKSREVVKRVDEELKESHDRLDERIKRDLK

SEQ ID NO: 16855 - protein, 60 aa, Artificial Sequence
  Synthetic
DEAREILKTLKDLIKELEDRNREVLERDKKTIEDLERRNARVLEENKKLIDEIRRIAKDI

SEQ ID NO: 16856 - protein, 59 aa, Artificial Sequence
  Synthetic
RSVEEALKKILRELEKKVEEVDRRLKRILEDSRRVVRRVDEEARKSHEELKRELDRIRK

SEQ ID NO: 16857 - protein, 60 aa, Artificial Sequence
  Synthetic
KEAEDLLRKLRELIKKLDDTNRRVLERDRKTIEELERRAEKILTDIERLIRELEDRVRRT

SEQ ID NO: 16858 - protein, 59 aa, Artificial Sequence
  Synthetic
EKVVEKARRILKELRDRIREVDKRLRELLEESRKRVEEVERELERLVRELEKKVREAEK

SEQ ID NO: 16859 - protein, 61 aa, Artificial Sequence
  Synthetic
SEVEDVVRKIKEILERLKKEVDDVLDRNRKLLEELKKRADEVLKRNKDLLETLKREADRDG

SEQ ID NO: 16860 - protein, 56 aa, Artificial Sequence
  Synthetic
KDELKRLLDELREIVKEAEERLRKSDEDLERIIREVKKRLKESNEELERTIREVER

SEQ ID NO: 16861 - protein, 58 aa, Artificial Sequence
  Synthetic
REVEEVVKEAEDLLRKLRELAKEFLTRHKKLIRDVTEKVKEVLKRSADSIRELEKIID

SEQ ID NO: 16862 - protein, 59 aa, Artificial Sequence
  Synthetic
EDAVRKLEEMVERLARIVEDVERKLKKLNKELEEIVRDAKRRLERLNEELRRRIREAER

SEQ ID NO: 16863 - protein, 58 aa, Artificial Sequence
  Synthetic
DEDEDIERKLKELIDRLREEVKKAEDEHKELIKRDHRRVEEVERRSEKSIKDLRDLAK

SEQ ID NO: 16864 - protein, 59 aa, Artificial Sequence
  Synthetic
EDVARRLEELVEELEDIVRKVKESLRRLNEELRKNSETVKKKLEDLNRELRKDIEEKRR

SEQ ID NO: 16865 - protein, 58 aa, Artificial Sequence
  Synthetic
SEAEKVLEEAKRLIEELERRVREVLKRSKKTIEDLRREVDRVVKEHKKLIRELREIIK

SEQ ID NO: 16866 - protein, 59 aa, Artificial Sequence
  Synthetic
EEVAKRLKDVLRELKDLVEKIEEEARRLNEELKEIIDRARKTLEDLNRELEEVVRRARK

SEQ ID NO: 16867 - protein, 59 aa, Artificial Sequence
  Synthetic
SEVDEVRRELERVITDDKRLVDESRRKNEKSIRDDEELIKTSRRINEESIRRLKELVER

SEQ ID NO: 16868 - protein, 56 aa, Artificial Sequence
  Synthetic
EETLRRLVKRLDETSEELEDENRRLNETLKRSSDELRKTNEELNKRLKEVVDRAKK

SEQ ID NO: 16869 - protein, 61 aa, Artificial Sequence
  Synthetic
SVEEKIKEMVDKIKDSVRRSTEENDRLVKEIDKVLKEAEKRNRDLLKEAADVLKRVLDKRR

SEQ ID NO: 16870 - protein, 56 aa, Artificial Sequence
  Synthetic
IDTVLKDMKKILDDNKKLVDDSRKKHKESIDRLRKLVKDSLDEHRESIERLERAAR

SEQ ID NO: 16871 - protein, 60 aa, Artificial Sequence
  Synthetic
REVEELERELEESNKELRKLIKELDDLLRETNKRLNDLIRELKERLDRVLEELRKIIKDD

SEQ ID NO: 16872 - protein, 59 aa, Artificial Sequence
  Synthetic
REVEKLVEEAIKRNEDLVRTVERKVDEAIKENRRSVEKVAEEVKKAEEELERIVDTVRR

SEQ ID NO: 16873 - protein, 60 aa, Artificial Sequence
  Synthetic
REVEELKKEADKTNEDLNRLIKELEERARESNRELKRLIDELRRRLEEVLKRLKDIIDKE

SEQ ID NO: 16874 - protein, 59 aa, Artificial Sequence
  Synthetic
EEVERLVTEMIKRNRTSVDAVRRKVKEMIDRNKALVETVRDEVRRAREKLRDILRKAEK

SEQ ID NO: 16875 - protein, 59 aa, Artificial Sequence
  Synthetic
SIEEIVRKVKEDLKRSLDELRKVSEDMARRLRESLKELEEVVREMEERLKRILDDIRRK

SEQ ID NO: 16876 - protein, 56 aa, Artificial Sequence
  Synthetic
ERDLKRRVDEVLTRSKESVDENKRTADRVLEESRESIKELKERAKRLLERLEEERK

SEQ ID NO: 16877 - protein, 60 aa, Artificial Sequence
  Synthetic
KEVEELEREARRMLEHTKRLIDEVRDRAKKSLDNTRRVDREVEKLVEDTERRLDELRKRG

SEQ ID NO: 16878 - protein, 59 aa, Artificial Sequence
  Synthetic
EELKRTAERMIEENRRLVETLKRVLEEAIRRNEELVKTLLRKLEESDKKIRKLIEETRT

SEQ ID NO: 16879 - protein, 60 aa, Artificial Sequence
  Synthetic
SELEELRDRLKEILEHTKKLIKESVERLEESLRNTRRVIRKVEEEVERTRTKLDDLRRRG

SEQ ID NO: 16880 - protein, 59 aa, Artificial Sequence
  Synthetic
EEMADVARRVIEENKRLVEENEDRLRKAIERNRELVEEVKKRLEDSDREIERLIREVKK

SEQ ID NO: 16881 - protein, 60 aa, Artificial Sequence
  Synthetic
DEVETLRREARKLLERIKREIEEVRRRLKESLDNTKRVEDEARKLVKETKDKLKRLAERG

SEQ ID NO: 16882 - protein, 59 aa, Artificial Sequence
  Synthetic
EEMRKVAEDMEREIRRLITDLRRELEEAIERNEELVRRLARELERSDREIKKRIDEIET

SEQ ID NO: 16883 - protein, 60 aa, Artificial Sequence
  Synthetic
SELDELRKRAKRSLETTEELIRRSRKLMRESLDNTRRVEEKVRRLVEKTLRDLEDLKRRG

SEQ ID NO: 16884 - protein, 59 aa, Artificial Sequence
  Synthetic
REMEETAREAIERNRKLVEDNERDLKKAIEDNEKLVRDLKRELERSDEEIKKLIREVKN

SEQ ID NO: 16885 - protein, 60 aa, Artificial Sequence
  Synthetic
DSREELRREAKRLLDDIKRLEEKVERLAREVLKHTEELDEKLKRLVEETLKKLEDLRRRG

SEQ ID NO: 16886 - protein, 59 aa, Artificial Sequence
  Synthetic
EELKRTAEEMERRIRELIKRLKDRLEDMIRRNKELVDRLKKKAERSDEEIERLIRETKK

SEQ ID NO: 16887 - protein, 60 aa, Artificial Sequence
  Synthetic
KEIEDVVRELERKVRENKRRNDEVIKRLERLVEKNTELVRRLIRTLEKLVEDLEDIVRRI

SEQ ID NO: 16888 - protein, 59 aa, Artificial Sequence
  Synthetic
EEAKKVAEDVERRIRRSVEEARRLLEEVKRKMEESVEESKRLLKKVEDEAKDVVDRARK

SEQ ID NO: 16889 - protein, 60 aa, Artificial Sequence
  Synthetic
SEIDKVIEELKDLVRKNEKRNRDVVRRDDKSVKDNTKRVEDVIRDLDRLIRELREIVERI

SEQ ID NO: 16890 - protein, 59 aa, Artificial Sequence
  Synthetic
KRAAELAKEVIDRMEESVKEAERLLRELKRKSEDSVRKSKELLDEVEKKVEEVVREAER

SEQ ID NO: 16891 - protein, 60 aa, Artificial Sequence
  Synthetic
EEIERAIEKVEREIRELEERVREIIERDRKSVEDNSRRVRTVIKELEKLVEELRKTVKDI

SEQ ID NO: 16892 - protein, 59 aa, Artificial Sequence
  Synthetic
EEARKLAEELRKEIKRVVDEVRKLLRDLERKSKESVREAEELLKRVRDELKEVVDRTEK

SEQ ID NO: 16893 - protein, 56 aa, Artificial Sequence
  Synthetic
SLREAVERLRKRHEDVVRELEKLVRRVKEELERVNKDLRKVVEEVRRRLEKVLEDA

SEQ ID NO: 16894 - protein, 55 aa, Artificial Sequence
  Synthetic
TDLLKRADDNVKRNRDLIRRLKEKADEIVKRNEDLIEDARRKADEMIKDLEEKAR

SEQ ID NO: 16895 - protein, 59 aa, Artificial Sequence
  Synthetic
SEVDELRERAKRIVDDLRRKIEEVVKRLEDSDEENKKLIEKAVRELEKIIRDLEEVIRR

SEQ ID NO: 16896 - protein, 59 aa, Artificial Sequence
  Synthetic
RELKELVDRLDKEATDVLRKVREDLRKAIERSERSHRRLEKLIEEIERELKRVVDEVTR

SEQ ID NO: 16897 - protein, 57 aa, Artificial Sequence
  Synthetic
DIEELLRKVAEEITRSVKESRDRLDEVEKKAREVVERSEKRLREVEEKIERVVRRIV

SEQ ID NO: 16898 - protein, 59 aa, Artificial Sequence
  Synthetic
EEDADKVLKEAEELVRRNRRLVEEVLRRLEEIVKRDEDLVRKVLKEADEIVRRLEEAAR

SEQ ID NO: 16899 - protein, 59 aa, Artificial Sequence
  Synthetic
SRVEDVVRRLKELNDENSEDSRRVLEKLKDEVRKNSDEIEKAAEELKEKLTRLKRLIEG

SEQ ID NO: 16900 - protein, 59 aa, Artificial Sequence
  Synthetic
KEVKELVKRVRETSKKSLKEDEDMVREVKKKLDDSLRRVDELVRRVEEEARRVLEEVKK

SEQ ID NO: 16901 - protein, 59 aa, Artificial Sequence
  Synthetic
DEVERVVKELRDKVDRNSREIEKAVTELRKIVKRNSDESKEVIERLEELLRRLEELIKS

SEQ ID NO: 16902 - protein, 59 aa, Artificial Sequence
  Synthetic
SRVKTLVDEVRKRAEDSLDTVKKLVDRVRERLDESLRDDKRLVDRVREEAERVVREVEK

SEQ ID NO: 16903 - protein, 60 aa, Artificial Sequence
  Synthetic
SDVEKIFDELRKLLEDLRRKVEEVFRRLKELVERNTRLNREVVKELKKTSDDLRDMVRRT

SEQ ID NO: 16904 - protein, 59 aa, Artificial Sequence
  Synthetic
EKVRKLVKEIRERIEKVLRDAEELLKEIEERVKESKKEAKKLLDEVRESVDDVKRKAEK

SEQ ID NO: 16905 - protein, 60 aa, Artificial Sequence
  Synthetic
SDVEEIVRKLDKLVEDNTRENEEAFKRLDETSKKLEEEVERVFRELKKLVDDLEKIIRDI

SEQ ID NO: 16906 - protein, 59 aa, Artificial Sequence
  Synthetic
EKVRKLVREVEKKVDESTERAERLLKRVEDSVRDVLRRAKELLDEIRKRVKDVERKAEK

SEQ ID NO: 16907 - protein, 60 aa, Artificial Sequence
  Synthetic
DEAREIRRRLKEVVDEVRKRLEDSLEEIDRRAKEVLEKVKRSLDRLRKVAEEVLDKLRRK

SEQ ID NO: 16908 - protein, 55 aa, Artificial Sequence
  Synthetic
ERVKRRVDEVVRKLREIVRKLTEENKRTVEDLERIVERLDRDNRKMVEDMEREVK

SEQ ID NO: 16909 - protein, 60 aa, Artificial Sequence
  Synthetic
REVEELKKRLEKIVEELKRIVDDHKRKVERIVEELEKLVEDHKRTVEEIVERAKRIVEKD

SEQ ID NO: 16910 - protein, 58 aa, Artificial Sequence
  Synthetic
ERLEEVAREIEEALKKVKRDLKESNRELEEVADRVRKELDRSDEDLERRMREVREELK

SEQ ID NO: 16911 - protein, 56 aa, Artificial Sequence
  Synthetic
SVLETLAERVKEVKDNLRKLVEDLKRLVDRIKETLDKLVEELRELVERLDDRLRKN

SEQ ID NO: 16912 - protein, 62 aa, Artificial Sequence
  Synthetic
RDLLKRLEEIMRRLEKEHKDVSKLLRDIEREIDRVHREVKRKIEEIVRKVRKSLEEVKRRAK

SEQ ID NO: 16913 - protein, 57 aa, Artificial Sequence
  Synthetic
SRAETVLKEVTDKIKKLKDSSDELLRRNKENIDELKKSSEELLRRLTKAIEEIEKAN

SEQ ID NO: 16914 - protein, 56 aa, Artificial Sequence
  Synthetic
DEVVKRVRDLLDTVRRRNEKVNEDVKRMNDKLRRDNEDVIRRVEKLLRELEEKRRT

SEQ ID NO: 16915 - protein, 59 aa, Artificial Sequence
  Synthetic
DLEEVVKEARRLLDTVRKKLDESIKEARELLREIEERFKKSADEVREELKRVEDELRRK

SEQ ID NO: 16916 - protein, 56 aa, Artificial Sequence
  Synthetic
VRELRKEVEDIIRRLDELVKKNTEDNRRVIKELRELVEEHTRRVKKIIEDLEREVR

SEQ ID NO: 16917 - protein, 60 aa, Artificial Sequence
  Synthetic
SVEEVVEEAKELLKEVEEELKRSAEEAEKLLRDVARKMEESVERLRRLLKDVERALREKN

SEQ ID NO: 16918 - protein, 56 aa, Artificial Sequence
  Synthetic
LRRLREKIEEIVRRLRELVRRHNEEVRRIIETLEELVRRNTETVEREVRRLRDEVR

SEQ ID NO: 16919 - protein, 59 aa, Artificial Sequence
  Synthetic
SVEKVLEDARRLLEEVKDRLKKSIDDAEKLLRELEKRLRESADEARRLLRRVKELLERK

SEQ ID NO: 16920 - protein, 56 aa, Artificial Sequence
  Synthetic
LRELKREIEEIVKRAEDLVRENTEKNKRVVDTVEELVRRHNEEVRRVVKELEERVR

SEQ ID NO: 16921 - protein, 59 aa, Artificial Sequence
  Synthetic
GLDEIIKRLREVLEKIREELRKSSEELERLLKRVDDDLERSNKELEELLERVRKKLEDS

SEQ ID NO: 16922 - protein, 59 aa, Artificial Sequence
  Synthetic
EELLRELEKEIKRVDEDLKRLVEEHEELVRDVLRKLEKLVREHKEKVRERVERADDKVR

SEQ ID NO: 16923 - protein, 59 aa, Artificial Sequence
  Synthetic
SLEEVLKELKKIVEDVTRRLEEMLRESKETSKEVEKELKKLDDEIREIIERAEEDLRRA

SEQ ID NO: 16924 - protein, 56 aa, Artificial Sequence
  Synthetic
EEILKEVAERLKKTAEEVKRELEKFIEDDRKRADEVRRENEETLKRIEDIVRELKR

SEQ ID NO: 16925 - protein, 58 aa, Artificial Sequence
  Synthetic
SALEKIMKDLEKSIEDVRRKLEDILRKLRKSSEEVKRRIEDIERKVDRAAKEILRSKG

SEQ ID NO: 16926 - protein, 59 aa, Artificial Sequence
  Synthetic
EDVVRRLKRTVEEVHKRNEDVVREAEKLVEKLSRINEEAVRRLADIVRRLEEELRKAEK

SEQ ID NO: 16927 - protein, 57 aa, Artificial Sequence
  Synthetic
REKEDVLRRIERIVREIERRLRESLKRNREIVKDLERLARRVLKESEDNLRKLKEDR

SEQ ID NO: 16928 - protein, 56 aa, Artificial Sequence
  Synthetic
REKLRKRLEEMKEELRKADERAKEIDTRTKRLVDEAVRKLEKLVEEHRRMTDEIRR

SEQ ID NO: 16929 - protein, 63 aa, Artificial Sequence
  Synthetic
REDETLEKILRRIEEIVRRLVREAEDVVRRDRETIERLVRENEKAVKEIKDIVDELTRLKKDK

SEQ ID NO: 16930 - protein, 58 aa, Artificial Sequence
  Synthetic
ESVREAAERLKDILRRLEELLRKVAKDLKKSNDELERLSEESVRRLREILKRLEDALR

SEQ ID NO: 16931 - protein, 60 aa, Artificial Sequence
  Synthetic
SEVEKILEDLDRSAKEAADRIKEIVDRLTELVKDLKKKNEESLEELDRLVKELADLLRRG

SEQ ID NO: 16932 - protein, 59 aa, Artificial Sequence
  Synthetic
EDKLRDIARRVREVNKRLEDLIRTVARAVRKALKDSEDLVREIAKRVEKALEDVRRAAK

SEQ ID NO: 16933 - protein, 58 aa, Artificial Sequence
  Synthetic
REVEEVIRKLERILEEAERMSRESERKLREILEKLERAIREIREELERIHKELEEKAG

SEQ ID NO: 16934 - protein, 56 aa, Artificial Sequence
  Synthetic
RDRLDKAVEELRKEIEEMLRRSDELVKRLDEKVKKVLKELREHVKRDKEKVDKDAE

SEQ ID NO: 16935 - protein, 58 aa, Artificial Sequence
  Synthetic
SSRERVIKKLEESLERLERLARKIKEDLERINRDLERLARKVEEELKRIHEELERRSG

SEQ ID NO: 16936 - protein, 56 aa, Artificial Sequence
  Synthetic
EDELDKRVKDLHRENEREIRRLEDHVRRDRERLEEALRDLEAHVKRDKDKLDKDAK

SEQ ID NO: 16937 - protein, 56 aa, Artificial Sequence
  Synthetic
SEIEDVARRLEEINKKSEDMARRIKEELEKVDEESERLVREVAKRLDEVLKRVRDD

SEQ ID NO: 16938 - protein, 56 aa, Artificial Sequence
  Synthetic
AEELKKRVEDLKRKNEDLIRRLEEKVRRLKKRNRDLIEELKKLVKELKDEAKKTSD

SEQ ID NO: 16939 - protein, 56 aa, Artificial Sequence
  Synthetic
SEEERIEKRLREIHERHKRMLDEIKKRLDDSLKTLEDLIRDVTRELEKVLKKAEDD

SEQ ID NO: 16940 - protein, 56 aa, Artificial Sequence
  Synthetic
AEDLDREVKRLEREIERSIKELEELVRKLHKENEELIRELEELVERLKRKIDETSR

SEQ ID NO: 16941 - protein, 60 aa, Artificial Sequence
  Synthetic
SEVEDAERVVRELEREVREEVKKLRKHVKETRDRDKDTVRRVEEKVKRLREKVKRVEDAR

SEQ ID NO: 16942 - protein, 58 aa, Artificial Sequence
  Synthetic
RAVREVLKELERVLRDAKRELDRVREEHERSHKELRDMLDRVKKELEKILEKLERALR

SEQ ID NO: 16943 - protein, 56 aa, Artificial Sequence
  Synthetic
EDKERVEEKIKRSLEEARREAERVRDKLRKSEEEIDRVMKRVLAEIDRVLKEVKEA

SEQ ID NO: 16944 - protein, 56 aa, Artificial Sequence
  Synthetic
SKELEDIVRRLEERNRRTVEEVERLVDEHNKRLREAAKELKKLVDDLERKLREDTR

SEQ ID NO: 16945 - protein, 56 aa, Artificial Sequence
  Synthetic
SEIEEVKKKLEKILRDHNRVVEEVAKEHEKILRDHNRVIREVKEELDRVLKKLRDD

SEQ ID NO: 16946 - protein, 56 aa, Artificial Sequence
  Synthetic
AEKLERLVKRIKEEVEESVKRLKDHAKENREDVKRSVEELRDVVRRLEERIKESAD

SEQ ID NO: 16947 - protein, 56 aa, Artificial Sequence
  Synthetic
SEIEEVARRLDEILERHNDVLRKVKEKHEEILRRHRKRVREVEEELKKILKELREK

SEQ ID NO: 16948 - protein, 56 aa, Artificial Sequence
  Synthetic
AKDLKRKVDELRRKAEESMKEVERHVRENAEHVKRSVEELEEDVRRLRKKLEEKER

SEQ ID NO: 16949 - protein, 56 aa, Artificial Sequence
  Synthetic
DEKEKVKEDLDRILEEHRREVEDVERKHRKILKDHEEVVRRVREEHEKILKRLKDN

SEQ ID NO: 16950 - protein, 56 aa, Artificial Sequence
  Synthetic
AKKLEDLVRRLKEHVDRSRERLEKHLRENKRHVEESAKRLEKHVRDNEEDVKRKST

SEQ ID NO: 16951 - protein, 60 aa, Artificial Sequence
  Synthetic
KEEEDLEREVKRLEDKVREDAKKLEEVVKTVEKLVRDDARRNEEVVKEVADRVRRLTERK

SEQ ID NO: 16952 - protein, 55 aa, Artificial Sequence
  Synthetic
EDVIRKMEEIIKRLEEVSREVEKRLRRIIRELERVSKEVLDRLREIIEKLDRDAT

SEQ ID NO: 16953 - protein, 56 aa, Artificial Sequence
  Synthetic
SVEDDVRRKLKEIEDEHRKVVKDARDELEKSHRRLRKVIEDVKRKLDRVLEELERS

SEQ ID NO: 16954 - protein, 56 aa, Artificial Sequence
  Synthetic
EKDLEEVIRRIRKKVEDSKRDLERLLEKSKRDVEEVMKDLKRRIEELEKLVRDETT

SEQ ID NO: 16955 - protein, 59 aa, Artificial Sequence
  Synthetic
SLKDELEKLLKELKEHVDRSEKKARENLKRLEEHVRKSKEELEDRLRRIEEKVKRLTES

SEQ ID NO: 16956 - protein, 59 aa, Artificial Sequence
  Synthetic
EEMVERAIRKLEDIHRRHREVVERVEREHRRIKEEHEKVVREAEETLKRIIEDLRRSAD

SEQ ID NO: 16957 - protein, 59 aa, Artificial Sequence
  Synthetic
KLEEEARELLRRLEEHVRKSKKEAEDNLRRLEKHVEDSKRRLKELLDRLRKTVEDLKRA

SEQ ID NO: 16958 - protein, 59 aa, Artificial Sequence
  Synthetic
EDVVRRAADALRRVHEAHKRMVEEVKRRHDEIHKRHEKVVRDAERALREVLKRLEEAAR

SEQ ID NO: 16959 - protein, 56 aa, Artificial Sequence
  Synthetic
SLRETADKRLRDVNRDLKRVIEELRERLKESNKKLEDLIRELRERAERILDDLRRS

SEQ ID NO: 16960 - protein, 60 aa, Artificial Sequence
  Synthetic
EEDLARRLEEIVKESKEIVDRARRRLEEIVERSEDRVRRVEERIKELVKRLEDIVRREKT

SEQ ID NO: 16961 - protein, 60 aa, Artificial Sequence
  Synthetic
KEIEEVLRRLEELIRRVREELRKNNEDIEREADKLRKELKRVNDELEKKIKDVKDRARRD

SEQ ID NO: 16962 - protein, 59 aa, Artificial Sequence
  Synthetic
KEVLDELRRVVEEVTREIREVLETSRELVRRIVETVKEVLRSHDEKIKKVEEELDRDRQ

SEQ ID NO: 16963 - protein, 57 aa, Artificial Sequence
  Synthetic
DVDEKVRELLRKIEEDLRRSVKELRELAKRIEEDLRRISKKSKDLLKKIKDDVKRAG

SEQ ID NO: 16964 - protein, 56 aa, Artificial Sequence
  Synthetic
EEDLKRVIEELKKEVEELHRRNEKIIRELEDKVRRVREDNERVIEELARDVERAER

SEQ ID NO: 16965 - protein, 59 aa, Artificial Sequence
  Synthetic
SLREEAEKIIRDLEDHVRRDEERVKEMVDRSRKLVKELEKRLRDLIREITRRVDKLRKD

SEQ ID NO: 16966 - protein, 59 aa, Artificial Sequence
  Synthetic
EKVLRKAEELLKRIIAELKKIHEELRRLSKESKERLERILDEARKMLEEVKKRLEDIEK

SEQ ID NO: 16967 - protein, 59 aa, Artificial Sequence
  Synthetic
SLEEKLEKLLKELRDHVRRDKKEVREALERLKDHVRKDREKLERAIAEIKKAVEKLKRD

SEQ ID NO: 16968 - protein, 59 aa, Artificial Sequence
  Synthetic
EKVLRKLEKAAREVAEAVKKVHEELKRALEEIRRELEDINRKLKEAADEVRKKLRDIAE

SEQ ID NO: 16969 - protein, 60 aa, Artificial Sequence
  Synthetic
SLEEELREVIKRLRDHVRRDKERAKEAIKRAEDHVRRDEEAVEEVIKELKRLVDELRKAK

SEQ ID NO: 16970 - protein, 59 aa, Artificial Sequence
  Synthetic
EDVLRRATKALEDIRRELEKINEELKRAAERIEKRLKEIHDRLKKALDDVRRELEETRR

SEQ ID NO: 16971 - protein, 59 aa, Artificial Sequence
  Synthetic
SLKEKLEREIERLRKHVEDDERRLREVIRRLEEHVKRDEDRLKKELDRLREEVERLRRA

SEQ ID NO: 16972 - protein, 59 aa, Artificial Sequence
  Synthetic
EEVLKEAEDLLRDVTRALEEVNRRARKLLKEIKEKLDEIHKRLNKMLEEVKRRLDEIRR

SEQ ID NO: 16973 - protein, 56 aa, Artificial Sequence
  Synthetic
SRAEEMIKDVRRIVEEVRRENKRVLEEIEEIIKRSKEEWEKILKELRDIIEEVERR

SEQ ID NO: 16974 - protein, 59 aa, Artificial Sequence
  Synthetic
EELLRRIKEVVDRARDTLRRLDEELKRIVEAVHDTDDKVKKELEKIVREVEEIARRRSK

SEQ ID NO: 16975 - protein, 57 aa, Artificial Sequence
  Synthetic
SEAERVVRENEENLERIKREVERDLRRNEEVLEDLRRKVKKVLDEIRETLRRLREAK

SEQ ID NO: 16976 - protein, 59 aa, Artificial Sequence
  Synthetic
EEAVRKLDDLDRRLEEIVRRASEALKRSLEEIERILRKAEEDLRRLLKRLEEIIREVER

SEQ ID NO: 16977 - protein, 60 aa, Artificial Sequence
  Synthetic
SVEDTLREMLKRLEEIVRRAEETLKRLNEEIERVVREAARRLDKLNKELRDIVRDIKRRK

SEQ ID NO: 16978 - protein, 56 aa, Artificial Sequence
  Synthetic
KDDLKRRLEEILKELKRIVDEAEERHREIIKRLRDIVREATEKSREVLKRLEDKAK

SEQ ID NO: 16979 - protein, 60 aa, Artificial Sequence
  Synthetic
KVREKLERALRRSTTSSRDIERRLKELLDTNREIVDRIVKRLKEMLDRLREEIRRIEERR

SEQ ID NO: 16980 - protein, 59 aa, Artificial Sequence
  Synthetic
DELVKRLEDDLRRWEKESKEIVDRVKEEIDRVNRESKETLKELEKEAKRVLDELERDER

SEQ ID NO: 16981 - protein, 60 aa, Artificial Sequence
  Synthetic
DVERTLDEMLKRSEDVTDEVREELKRALESNNKLIKEIVDTADKVLKDIEDTVRKIIEKK

SEQ ID NO: 16982 - protein, 59 aa, Artificial Sequence
  Synthetic
EKLVKEVEDRARKWLKDLRDKIERLREELEKVNRDTERILEKVERDLRRLLEEVRKRDR

SEQ ID NO: 16983 - protein, 56 aa, Artificial Sequence
  Synthetic
DEVEKVLREIEEIIKELKKEVDKDLEELKRTIERLKKKADEVVKRNEEVIRTLREG

SEQ ID NO: 16984 - protein, 59 aa, Artificial Sequence
  Synthetic
KEAADKLRELLKRLEEVVRRWKEAIEDINRKLEKVVRDIERLLRDLDRKAREVLERLRK

SEQ ID NO: 16985 - protein, 56 aa, Artificial Sequence
  Synthetic
SSVEKVLRELDDLIRRNRDLVEEDRKELKRTSDENRERVERIVRKNEKAIRDLRRN

SEQ ID NO: 16986 - protein, 59 aa, Artificial Sequence
  Synthetic
KKAADDLKRVLDKLRKSHREWNELIKKANKENTEILREAEERLRELDRRLRKVLEDLRR

SEQ ID NO: 16987 - protein, 60 aa, Artificial Sequence
  Synthetic
SEVERVLKELKELLDRLRELVEEILRRLEKIIKETKREIEESLRTLEEIIRRLEELAERV

SEQ ID NO: 16988 - protein, 58 aa, Artificial Sequence
  Synthetic
DADRALRKVLEDIKEIVKKAKEDLERVYKKHKKLVDEVKKAHEDVLKKAREVLEEIRR

SEQ ID NO: 16989 - protein, 60 aa, Artificial Sequence
  Synthetic
DEVEDVLRKIKEIIKRTEDKVRESLKTLKEIIRRTKEEVKKILKEIKELIERVEREARRV

SEQ ID NO: 16990 - protein, 59 aa, Artificial Sequence
  Synthetic
ERAETKLRELYERHRKVIKEVRERHKEVHKRHRDVLEEIRRRLEKLLKDLEDVIREIER

SEQ ID NO: 16991 - protein, 56 aa, Artificial Sequence
  Synthetic
DEEKDVVRRLKRNVEENTKNVERMVRELERNIRENTENAKEVITRLKKIIDELRRR

SEQ ID NO: 16992 - protein, 55 aa, Artificial Sequence
  Synthetic
EDVKRVRKLARESLERVRRLHREVLEKLKKSHDDVKRLHEEIDERAKRVVEEREK

SEQ ID NO: 16993 - protein, 56 aa, Artificial Sequence
  Synthetic
DAEELLKEIERELKRSIEEARRLLEEVEKRLRKSKRDVEKLLKEVREKLEKVVREI

SEQ ID NO: 16994 - protein, 59 aa, Artificial Sequence
  Synthetic
RDVVRRLVEEARKLVEENTRENRDMIEKLRRLVKRHSEEVEEIIRRLDKLIDDVRREAE

SEQ ID NO: 16995 - protein, 59 aa, Artificial Sequence
  Synthetic
SLEELLREVERRLRELNKKLEDMIREVEERLRKVIRETEKLIEDVKRELEKILEKARER

SEQ ID NO: 16996 - protein, 56 aa, Artificial Sequence
  Synthetic
EKELEKEVRDDLRRTDEDIRRLLDEARKDVERHKEELKKLLEDAKRLLERVERTIR

SEQ ID NO: 16997 - protein, 57 aa, Artificial Sequence
  Synthetic
RELEEVVKKVREEVKEHTEKVKRLVEEAEELNRRYEEEVKKLVTTAKRLNDEARKRN

SEQ ID NO: 16998 - protein, 56 aa, Artificial Sequence
  Synthetic
KELLDEVAKLVEESLRRLDRLLEEIKRTSDELIEKNERLNRELNKTSDKVVEDMRR

SEQ ID NO: 16999 - protein, 60 aa, Artificial Sequence
  Synthetic
SLEDLIREVEDRNRKSVEEVERLLEEVRRKLDESRKRLEELLKRVEEKLERVIEEAKRRL

SEQ ID NO: 17000 - protein, 59 aa, Artificial Sequence
  Synthetic
EKVVEELAREMKKSVEEHTREVRRMVAELEKLVKRHTEEVERAVREAEKLVETLREELR

SEQ ID NO: 17001 - protein, 60 aa, Artificial Sequence
  Synthetic
SLEDLIREVEKRNKESVDTARRLLDEVRKKLKDSIDRSRKLLEEVRRKLEEVIKDAKRKL

SEQ ID NO: 17002 - protein, 59 aa, Artificial Sequence
  Synthetic
ERVVEEIMRRLEKSVERHTEEVKRVVREAEELVKDNTRKVEELVRRAEKLVEDLERRTR

SEQ ID NO: 17003 - protein, 60 aa, Artificial Sequence
  Synthetic
SLEELIREVEERLRKSVDDSRKLLEEVKRKLEDSKREVDRLIEEVKRELERVIEDVTRKL

SEQ ID NO: 17004 - protein, 59 aa, Artificial Sequence
  Synthetic
EKVVKELADEMRKLVRTNTEIVKDVVKKLDELVERNTRTNRDVVRRARELVEELERRER

SEQ ID NO: 17005 - protein, 57 aa, Artificial Sequence
  Synthetic
RELERVVEEARRLVEEHTEEIERSADKARKLNEEHSRRVDEIFERLERLIREAEKKN

SEQ ID NO: 17006 - protein, 56 aa, Artificial Sequence
  Synthetic
RELLEEIRKLVEESVERVKRLNEDVNRTSKESVKRLEDLVDEIRKRVEEVVRRLKK

SEQ ID NO: 17007 - protein, 56 aa, Artificial Sequence
  Synthetic
SELERVAEEAERIVREAEEKIKKSVTELKELVKRHSERVKRIFKELEELLRRLREK

SEQ ID NO: 17008 - protein, 56 aa, Artificial Sequence
  Synthetic
EDLLREVRKKVEEVVKKIKRLNEEVNRDVKRSAEELKRLIDDIRRILKKVIDDLKT

SEQ ID NO: 17009 - protein, 56 aa, Artificial Sequence
  Synthetic
DEMEEVVKRAEEIVKEARERIEESFRRLREENKEALERLKRIAEEMRRLLKEVLER

SEQ ID NO: 17010 - protein, 56 aa, Artificial Sequence
  Synthetic
EELLRRVEKEVRRVEEEIRRLNKEVNETSDRVEREAEKLVRELEEAVRKVVEDLER

SEQ ID NO: 17011 - protein, 59 aa, Artificial Sequence
  Synthetic
DLEEVIKEARKRLEDSHRRLEKLIREVEKEHEDSHRKLRELVERVKKKHKEVEEKIKRN

SEQ ID NO: 17012 - protein, 56 aa, Artificial Sequence
  Synthetic
VEELLKDLERMVRELNEEIERALEDAKRNVDRLDDEIRKLEERVDRNVKRLEEDIK

SEQ ID NO: 17013 - protein, 59 aa, Artificial Sequence
  Synthetic
SLEDVAREAKKRLEDLKKKITDLIREARRKHKESHDRLRELVEKIKEDLKRVLKKLEDD

SEQ ID NO: 17014 - protein, 56 aa, Artificial Sequence
  Synthetic
VREVKEKLRRTVEALDERIDKLRKELDENVRRLDKEIEDMVRKAKKVVDELREEIR

SEQ ID NO: 17015 - protein, 59 aa, Artificial Sequence
  Synthetic
DLDEVVKEVDRRLEESHERLRRLIKKVDEDHRRSHEDLKRVIDEARRLLEEVLERLRRN

SEQ ID NO: 17016 - protein, 56 aa, Artificial Sequence
  Synthetic
VEEVLKEVKKAVEKLNEDIDRLFEKARENVKRLDEDIKRLLEELRRKVKKAEDEIR

SEQ ID NO: 17017 - protein, 59 aa, Artificial Sequence
  Synthetic
DLERVVEEVKKLLRDSHEEHKKVVKEVKERLDRSHKESKRVSDEVRKKLEEVLKELEDR

SEQ ID NO: 17018 - protein, 56 aa, Artificial Sequence
  Synthetic
VEKVLRDVRRVVTELNKHIEDLKRKVTEDVERLNTEIKELKKRNDEAVRRAREEIK

SEQ ID NO: 17019 - protein, 60 aa, Artificial Sequence
  Synthetic
KEDEDLDRDVKRHIEETEKRVKEVEKRHKDEIRKVREDVKDVERRHKEKIDDVRRKLRDG

SEQ ID NO: 17020 - protein, 55 aa, Artificial Sequence
  Synthetic
EEILRKLRKRTEEIKREAERIHDRTREEIEKIKRDLDEIHKRTREVIKELEERSR

SEQ ID NO: 17021 - protein, 60 aa, Artificial Sequence
  Synthetic
KKEEDIEREIRDHIRRTREKLEKLAKELRDDIRRLREELKRIEDEIREESKRLEDILRKG

SEQ ID NO: 17022 - protein, 55 aa, Artificial Sequence
  Synthetic
EDILRRLREETEELRKEAERLLREYKRLTEELARELRELVKKLEEEVRDLERRSR

SEQ ID NO: 17023 - protein, 60 aa, Artificial Sequence
  Synthetic
SEEERIEEDIRRHIKRTRDRLDELRRRLEEDIKRLRERVEDLKRDLERNIRELRDRLRRG

SEQ ID NO: 17024 - protein, 55 aa, Artificial Sequence
  Synthetic
EEILRRMERLTRELAKDADRLLKKYRKLTEDLKRELEKILKTYRDLTEELKERSR

SEQ ID NO: 17025 - protein, 56 aa, Artificial Sequence
  Synthetic
SELDELRKRIEEAAKELKKRLEDHKRRLEEAEERFERDLERIHRRSREVVRDLKER

SEQ ID NO: 17026 - protein, 62 aa, Artificial Sequence
  Synthetic
DRILREVEDIVRKLKEILKEVRDRLRELSKRLEDRLKEVEDKLDKDVKDVEEELRRILEERK

SEQ ID NO: 17027 - protein, 61 aa, Artificial Sequence
  Synthetic
SRLEKAEEDIKRYIEEHKRRSEETLKELTDKAREITRRLDESLKTVEDTSREIKKDVEDRG

SEQ ID NO: 17028 - protein, 59 aa, Artificial Sequence
  Synthetic
EDLRRVIKRIRELLERLEREDRRIIEEIKKLLDRLKKKVEDIIERIERSLKRLEEELRR

SEQ ID NO: 17029 - protein, 60 aa, Artificial Sequence
  Synthetic
SEEELLRKLEEISRRVTRALEKLLEDHERLSREVAERLEDLLRRHKKLLEELIKLAEERV

SEQ ID NO: 17030 - protein, 56 aa, Artificial Sequence
  Synthetic
EEELDERIRRLKDKNKKNLDDLREHSKEVLERNKENLDELRKHSKKVLDEARKELK

SEQ ID NO: 17031 - protein, 59 aa, Artificial Sequence
  Synthetic
DEKERAKEEVKKLRDDAEKTDRDLEKEVEDTARELKETLERLRREVERLEEELERISRR

SEQ ID NO: 17032 - protein, 55 aa, Artificial Sequence
  Synthetic
KDLTEELKRVLDDHERTLRKIEEDLRRILEEHKKETKKITEELERILEKMRKDEE

SEQ ID NO: 17033 - protein, 56 aa, Artificial Sequence
  Synthetic
STKEELLERAKEIIKRLEELLRRNNRTLREILKDLKKRLEESNREIKRLIDEVTRN

SEQ ID NO: 17034 - protein, 56 aa, Artificial Sequence
  Synthetic
DEDLRRELERLKEEVDRAHKESEEIVKKLEKRIRDAIRRSKKRVDELEKELREAEK

SEQ ID NO: 17035 - protein, 56 aa, Artificial Sequence
  Synthetic
SEKEEVDETLRRLEEEHERVVRDAKRRLEEDHEKLRRVIRDSDRINDEINKKAEED

SEQ ID NO: 17036 - protein, 56 aa, Artificial Sequence
  Synthetic
AEELKRILDETRERIRESMEEIKRKLEESRRESEDIRRKLKEDNDRLKKELDDRAK

SEQ ID NO: 17037 - protein, 59 aa, Artificial Sequence
  Synthetic
SSEEEIRETVKRLKEIVKKHKKDVDEIAEELRRIVEELRRRNEEEIKKIRKILRELEEK

SEQ ID NO: 17038 - protein, 59 aa, Artificial Sequence
  Synthetic
EKLVRELERIVEEIKEELEKSDRELEKIIREIAKRLEEIHEETERAVREVKKRLDEVAK

SEQ ID NO: 17039 - protein, 56 aa, Artificial Sequence
  Synthetic
SEEEKLLERLERTVERLEREARRLLEKSKEKLKRLEDSSRELLDKLRKEVERLRRE

SEQ ID NO: 17040 - protein, 59 aa, Artificial Sequence
  Synthetic
EDFLRELEKLLEEIKRKIEEARERLERSNKELEDVIRDSERRLRKLLKEIEEVIRRKAT

SEQ ID NO: 17041 - protein, 56 aa, Artificial Sequence
  Synthetic
SEIERLLERLKKALEEIKRSSERLIRKLEEVLRDLEREVRKLLEDSRRTLERIRKE

SEQ ID NO: 17042 - protein, 59 aa, Artificial Sequence
  Synthetic
RDAVEELERLLKEIEKTIEESRRRLEELLERIERLIRKVIEELRRSNEELERVIREKSK

SEQ ID NO: 17043 - protein, 59 aa, Artificial Sequence
  Synthetic
KVEKRLRELVERIRESHERVLREVERLVEEHRETLKRILDRIREILKRIEEDIESIRRR

SEQ ID NO: 17044 - protein, 59 aa, Artificial Sequence
  Synthetic
EEVVREELERLERNIKESRDDIRRALKELKDTNEKAKEELERKLEELDRDLKRLREEAR

SEQ ID NO: 17045 - protein, 60 aa, Artificial Sequence
  Synthetic
SEVEDELRKSRKEIEDLAREAERELEEIKRHIERSERKAKEDIDRIEREIEELDKLRKEN

SEQ ID NO: 17046 - protein, 56 aa, Artificial Sequence
  Synthetic
EKALRKSHKELEDLVREVEKKLRELLERYRKRIEEVAKKLDDLLDKLREVVDRAKK

SEQ ID NO: 17047 - protein, 59 aa, Artificial Sequence
  Synthetic
SEVERELKRIKDEIRELAREAREDLERIKEHIKRSKERVEEELRRSEEEIKEIERLARE

SEQ ID NO: 17048 - protein, 56 aa, Artificial Sequence
  Synthetic
KDDLDRLLEELERVVREVKKRLRKLLEDYKELVDRVRKKLEDSHRRLKELAERTKK

SEQ ID NO: 17049 - protein, 60 aa, Artificial Sequence
  Synthetic
DVERELDRIHREHEELLRDIEKKLREILREHEELLKRIKEELDEILERLRKLVEDVKREK

SEQ ID NO: 17050 - protein, 59 aa, Artificial Sequence
  Synthetic
EEEVRDILRRLKEEIDRSRREAEEILRRLKKEIEDTKREVDETKKDLKRTLDEIREEAK

SEQ ID NO: 17051 - protein, 59 aa, Artificial Sequence
  Synthetic
SEVEEEVERIDRNIDRLRKEVEDNIRRSEEEIKRIKEEVEKNLEDLRREIDRIRELVEA

SEQ ID NO: 17052 - protein, 60 aa, Artificial Sequence
  Synthetic
MERMKRKLKELLDKHKKLVDDAKKKHDDSNRKLERLIREATKEHKKALEDLKKLIDDSRR

SEQ ID NO: 17053 - protein, 61 aa, Artificial Sequence
  Synthetic
KDTEEAEERWKAKDKKLEDDVRENLKRLREEITRLEKEVKDNVRRIKELIDKLRRDVEREG

SEQ ID NO: 17054 - protein, 59 aa, Artificial Sequence
  Synthetic
EEAKDSLRKLKKHSDDTVRRVKEEHERVLKEAKELLDKVEKEHRRLLEELERLLREARK

SEQ ID NO: 17055 - protein, 61 aa, Artificial Sequence
  Synthetic
SEEDKERKKWERRDEELRKRVERNEREWERADKELEEEVKREVERIRREIEELRRRVEKDG

SEQ ID NO: 17056 - protein, 59 aa, Artificial Sequence
  Synthetic
DEARKELERLLEHSRKLLEDVRRSHEELVKHSKERADRIRETLKKLLDDLRKLLEDARK

SEQ ID NO: 17057 - protein, 61 aa, Artificial Sequence
  Synthetic
SDIERRKEEWKREDEKLEKRSRKNVEDWERRDEELKRRSEENVRRIKEMIERLEDRVRRDG

SEQ ID NO: 17058 - protein, 59 aa, Artificial Sequence
  Synthetic
EEARKELEKLLRNSKRLVDESERRLRELERHSRELLKRSRRELERLMKELEDLAREIRR

SEQ ID NO: 17059 - protein, 59 aa, Artificial Sequence
  Synthetic
RESEKIKEDMDRSNEKHNKEVEETLKRLEEELKRLEDEVRDAKRELDELLERLERRARD

SEQ ID NO: 17060 - protein, 59 aa, Artificial Sequence
  Synthetic
KELEDLARDVAKKNKESVDRVKKELKRVDEEVKRLLDEVKKDLDKVREDLKRVIDEIRR

SEQ ID NO: 17061 - protein, 61 aa, Artificial Sequence
  Synthetic
SEVEKVITEVEELVREYRKRLEDKRREAKKRVDEYEERLKRMEDEVRKLLEEIERRIRKDG

SEQ ID NO: 17062 - protein, 56 aa, Artificial Sequence
  Synthetic
KDALRRAEEKLKKLIKENKEINDEINERSKELNERSKEVLKKIEEDLRRLIEEVRR

SEQ ID NO: 17063 - protein, 59 aa, Artificial Sequence
  Synthetic
SREDLVREVRERLKKLLKHSAELIKRVKEELEELLRHSEENVREVKKRLDEIKEEAKKR

SEQ ID NO: 17064 - protein, 56 aa, Artificial Sequence
  Synthetic
IEDERRAVEETEERWRRKDDTVRKEVEEEKEKWRREDEKHHRDVERALRKLKRDIE

SEQ ID NO: 17065 - protein, 59 aa, Artificial Sequence
  Synthetic
DEDELVREAKDRLDKLLEHSRKNVEEAEKRLRDLLEHSKKNVEEAERLLEEIEEEARRS

SEQ ID NO: 17066 - protein, 56 aa, Artificial Sequence
  Synthetic
LEEVRKEVKKEIDDWRARDEEHHRDVKRREEEWERKDEEHHRKVEEVIERLKRELK

SEQ ID NO: 17067 - protein, 59 aa, Artificial Sequence
  Synthetic
SVEELIKEVEERLKRLKEHSEDLAREVRERHKKLIEELRRILEEVKKRHKDLTEKLEKD

SEQ ID NO: 17068 - protein, 55 aa, Artificial Sequence
  Synthetic
EEMKKRVEEEEKKWKRDDERLEKRVRENIERLRRLLERLRKRVEDNIKRLDDERR

SEQ ID NO: 17069 - protein, 59 aa, Artificial Sequence
  Synthetic
REEDLIREVERILEELLKHSKRLIDEARDSHRRLLEHSKRLVEEVERLHKELLDRAREN

SEQ ID NO: 17070 - protein, 55 aa, Artificial Sequence
  Synthetic
DRMREEVRKTEERWRDKDRELEKRVRDNERRWEDRDRKLEKRVRDNIKRLRDELE

SEQ ID NO: 17071 - protein, 59 aa, Artificial Sequence
  Synthetic
KAEELVEKVRRDLEALLEHSKTLAEKVRRDHRKLKEELKELLERVKRRLEELKKRLEDS

SEQ ID NO: 17072 - protein, 55 aa, Artificial Sequence
  Synthetic
DELRKKVDEDRRRWEEDDRRLEKRVRENLRRLEKIIKDLEDRVRREVEKIDKDRK

SEQ ID NO: 17073 - protein, 59 aa, Artificial Sequence
  Synthetic
DREKLIEEVKDRLRRLLKHSRELLKEAEDRHRELLKHSERLVRESERRLEELLRRARKS

SEQ ID NO: 17074 - protein, 55 aa, Artificial Sequence
  Synthetic
DEVRKEVKKDEDDWRKADDDLRKRVEDNVRRWEERDRELKERSERNLEKLERERK

SEQ ID NO: 17075 - protein, 59 aa, Artificial Sequence
  Synthetic
SREDLVRRVDKALRDLTRHSEELMRRSDETLKELLKHSRRLAKESEDRLKELLDEARER

SEQ ID NO: 17076 - protein, 55 aa, Artificial Sequence
  Synthetic
ERLEEKVRREEEEWKKKDEELKKRSEKNVDEWRKRDDKLRRDSKRNLDKLREEIR

SEQ ID NO: 17077 - protein, 55 aa, Artificial Sequence
  Synthetic
SLVDEIRERVRRLDEDVRRLIEEIEKRIREIDKRAEDLIRKIEDDSRRTLEEVAK

SEQ ID NO: 17078 - protein, 58 aa, Artificial Sequence
  Synthetic
EELEKVVEENERSLRELVKTLEDVLRKNDKTVKELEKRLREVLDRTRRFMEELIRRAR

SEQ ID NO: 17079 - protein, 55 aa, Artificial Sequence
  Synthetic
SLKDKIREDSERTLKTVERLLREIEKEIRKLDRDIERLIEEIRRRIEKLDKDIER

SEQ ID NO: 17080 - protein, 58 aa, Artificial Sequence
  Synthetic
EELEKVLKDTRDEAERLKEEVRRVLEDNDRTAKELRKTLEEVLKRNEESARELKKRIT

SEQ ID NO: 17081 - protein, 56 aa, Artificial Sequence
  Synthetic
DEERRVEEELREVDKRLKKLLEESKRKLDEVIRRVREVVKKLKKRLDDVNRLVARD

SEQ ID NO: 17082 - protein, 55 aa, Artificial Sequence
  Synthetic
EKILRTVEKLVRDIERELRETNKRVREDVEKIIEDLKRILEENDKRADDWRRADK

SEQ ID NO: 17083 - protein, 56 aa, Artificial Sequence
  Synthetic
DESEEVARELEKVDRDVDKLVKDSRKELEDSNREVEELLRRSTERLKEVNTLVARD

SEQ ID NO: 17084 - protein, 55 aa, Artificial Sequence
  Synthetic
EKLVREVERRVEDIKRKAEKTLDDNRKLIEEWVRRLEKSLEDNRRLAKKWKDEDK

SEQ ID NO: 17085 - protein, 57 aa, Artificial Sequence
  Synthetic
SELDELKKEVDDVAREVRRHNKKLEEEVEREVRRMRRHNEENVKRVEESAKEARKDV

SEQ ID NO: 17086 - protein, 56 aa, Artificial Sequence
  Synthetic
LREVKKLVEEVTRRLERINKELERLIREVRKRMERVNDELHKRNRDVERKLREVVR

SEQ ID NO: 17087 - protein, 57 aa, Artificial Sequence
  Synthetic
SELEALEEDVKRVVKEIKDHNEKLIRELEETIRRIDRHNDENIRRTEEEIKRVLDKK

SEQ ID NO: 17088 - protein, 56 aa, Artificial Sequence
  Synthetic
EEDLRRLLEKLKEDLRKVNEDLERLLREAKRRLERVNEKLHELSRRIREKLEEVDR

SEQ ID NO: 17089 - protein, 57 aa, Artificial Sequence
  Synthetic
SELEKLVEKIKERVERARRHNERLREDVERVLTESDKENKDLIDDARRAVKEVLDRK

SEQ ID NO: 17090 - protein, 56 aa, Artificial Sequence
  Synthetic
EEELDRLIREIIKELEDVNRTLRKLLEEIKRRSKDVNRDLRRLLEEIKEKLRRKSK

SEQ ID NO: 17091 - protein, 57 aa, Artificial Sequence
  Synthetic
SEIDELKKDVERRVREVEETNRRLEKEVRERLERSRKHLKELIEDARREVERVEREV

SEQ ID NO: 17092 - protein, 60 aa, Artificial Sequence
  Synthetic
KKKVLDELKKVIKEVEDRLRKIDEELKKVIDEVRKELEKINRDLERVIREVKKRAEEVRR

SEQ ID NO: 17093 - protein, 57 aa, Artificial Sequence
  Synthetic
REIEELAKTVRKEVDDSRKHLKELREDAKRTLDEVKRETKKLEEDVRREVERVKREV

SEQ ID NO: 17094 - protein, 60 aa, Artificial Sequence
  Synthetic
KEKVLRELKKVIDEVRKLLEDINRELEEAIRDVKRKNEDTLRELRKVIKEVEKRLKDVTR

SEQ ID NO: 17095 - protein, 58 aa, Artificial Sequence
  Synthetic
KEVEDVVRELKKSLEENEKRVRDIERELREVVKKIAKRVEETREEVERMLEEIRRRSG

SEQ ID NO: 17096 - protein, 56 aa, Artificial Sequence
  Synthetic
IKKVVDEARKVLKEVHENTERIVDEARKLLKRMEEKNRKTEEDIRRVADEVREKAR

SEQ ID NO: 17097 - protein, 58 aa, Artificial Sequence
  Synthetic
SKVDKVREEVTRSLEDNKRKVEEIEREARESLERNRKKVEDSIREARKVVEEIERKKG

SEQ ID NO: 17098 - protein, 56 aa, Artificial Sequence
  Synthetic
IDTVTRRIREVMKKVHDNTRRIAEELRRLMKRVHDNTERSHEELKRLLEEVKRKAD

SEQ ID NO: 17099 - protein, 58 aa, Artificial Sequence
  Synthetic
REVEEVVKELKKSLDDNRDEVRKIIEEVTRLNKRNEEDVKRVTDEAEEVVKRIVEKKG

SEQ ID NO: 17100 - protein, 56 aa, Artificial Sequence
  Synthetic
IRKVVEEARRLLERVHRNTKRVADEIRKLDKRSSELLDKILKDLRKLLEDVEREAR

SEQ ID NO: 17101 - protein, 63 aa, Artificial Sequence
  Synthetic
DEKDEVRRRVDRELEDVHRETKKSSDDDKRLLEDVHRKLKESEKEVRRIADEVRKKLEDVRRR

SEQ ID NO: 17102 - protein, 55 aa, Artificial Sequence
  Synthetic
REVLEKIKRSLDENKERVEKSKKDSDDSLRENKDRVDKTDEEAKEMIKDLKRKTD

SEQ ID NO: 17103 - protein, 63 aa, Artificial Sequence
  Synthetic
DEKEKVTREVRRILEEVDKRLEESRERVERIAEEVHRRTEESHRRDEEVVERVKEELKEARRD

SEQ ID NO: 17104 - protein, 55 aa, Artificial Sequence
  Synthetic
REVLEELKRELRRLEEDVRRTDRKLEESLKDNERKVRRSKEESDRLLRELEERTR

SEQ ID NO: 17105 - protein, 63 aa, Artificial Sequence
  Synthetic
KEVEDVRRRVEKILEEVHKKTREVTERVRRILEEVHRKTEESHRRDEEVMRRVRDELEKARRR

SEQ ID NO: 17106 - protein, 55 aa, Artificial Sequence
  Synthetic
REVIEKVKESLRENERRARKVEKEIRDSLERNRERVEDSKRTSKKLIEDLREAVR

SEQ ID NO: 17107 - protein, 63 aa, Artificial Sequence
  Synthetic
DEEKELVRELRDILKKVHKETKESSDTDREVLKRVHEDTERSHRDDERVVEEVKKELDKIRDR

SEQ ID NO: 17108 - protein, 55 aa, Artificial Sequence
  Synthetic
REVEDEVRRSLEDNRRRVEESKRRSDESLRRNKRKVERSKEESDRLLKELEDEVR

SEQ ID NO: 17109 - protein, 57 aa, Artificial Sequence
  Synthetic
REVEEALKRNEAVVEESREAVERALRENETMVRESEKEAKRVKDENRKSIEELKRSN

SEQ ID NO: 17110 - protein, 59 aa, Artificial Sequence
  Synthetic
EEVLERVVRKLKELDDKSREDLEKVKKELRDVDTRSEELLREVEKRLREVDDRLRREEE

SEQ ID NO: 17111 - protein, 57 aa, Artificial Sequence
  Synthetic
SEVEEVEKENKKMVEESERELEKLERENDKLLKESEDEARKVEEELKRVVEELDRSN

SEQ ID NO: 17112 - protein, 59 aa, Artificial Sequence
  Synthetic
EEVLREVVKDLRRVDKESKERLKRMADKLRDVDRELKEKLKRALEDLRRIVTELRERAR

SEQ ID NO: 17113 - protein, 60 aa, Artificial Sequence
  Synthetic
DEVETVTRELEDTNRDIEKKVEEVERELRKTDREIREKVKRVEEELTRSDRELAEIVKKK

SEQ ID NO: 17114 - protein, 59 aa, Artificial Sequence
  Synthetic
GEDVKRIVEKARKINEDVRREIEKITEEVRRINEEVDDRIRRIAEEARRINEKVKRRLT

SEQ ID NO: 17115 - protein, 60 aa, Artificial Sequence
  Synthetic
KEVDDVAEELRRTNKEIKDRVKDVLRELEELLTDIEKTVRDVERELRESDERLEREVRRK

SEQ ID NO: 17116 - protein, 59 aa, Artificial Sequence
  Synthetic
GEEVRRIVEKARKINTEVKKKIEEIEKTVRKILKEVRKIIKDIRDEARRINEEVRKKLE

SEQ ID NO: 17117 - protein, 56 aa, Artificial Sequence
  Synthetic
KEVEDIVRELEEEVEKIRDHSRRVSEELDKSVKDNKRRVDEVKKTLEKSVRDIRRK

SEQ ID NO: 17118 - protein, 58 aa, Artificial Sequence
  Synthetic
EVLKDVARRAREMLEEVRRKDRENTERARRLLEEVHRRTEEVERRAREVLKKADEDVK

SEQ ID NO: 17119 - protein, 60 aa, Artificial Sequence
  Synthetic
SELDELRKRVRDLDERLKESDDTLRKLVKELIERVKKSDTELERLVERVIEEIERVLRDR

SEQ ID NO: 17120 - protein, 60 aa, Artificial Sequence
  Synthetic
VKDRLRELEEELRKRMKESDERNRDLRRRLEEMIKDSKRTNDELKKRVEKVAREAEEKLR

SEQ ID NO: 17121 - protein, 60 aa, Artificial Sequence
  Synthetic
DELERLEEEVEEVRRRLEKSDDDLRKLVDEVERRLRESDKRLHDLSEEVIRRIEDVLRKN

SEQ ID NO: 17122 - protein, 60 aa, Artificial Sequence
  Synthetic
VKDELRKLKEKIKKVADESRRRNEELRRKVDKVIKDSRETNKRNTEEVRKVAKDVDDTVK

SEQ ID NO: 17123 - protein, 60 aa, Artificial Sequence
  Synthetic
SEEERIAKEAEDLVRRVKENNARTIKEAREVARKVEAETKKIHDDARKLVEDVKRKVERR

SEQ ID NO: 17124 - protein, 55 aa, Artificial Sequence
  Synthetic
RELKERLERVIKEIEETIRRSARELDEVNRRNEKMVKENEDELRKVIEEIERRIR

SEQ ID NO: 17125 - protein, 58 aa, Artificial Sequence
  Synthetic
DEEEEIKKELRRVAEDVKRETKRIHEEIRRVLKEVKERLKRVHDELRRVAREVKEKLK

SEQ ID NO: 17126 - protein, 55 aa, Artificial Sequence
  Synthetic
RELTEEAKKLIKENEEEIERNEREARKVIEELERVVRTNKEDVKRVEKEIEDATR

SEQ ID NO: 17127 - protein, 58 aa, Artificial Sequence
  Synthetic
KEVEEIAKEAEDVLRRLDETVKEIADEAREVLRRLNESSKRIEEEARKAIKELRDRAR

SEQ ID NO: 17128 - protein, 59 aa, Artificial Sequence
  Synthetic
KDELRKILKEVRDVLEEVKRRNEDILRRLRKIAEEVKRRNDKIREELERVLKEAEDRLR

SEQ ID NO: 17129 - protein, 55 aa, Artificial Sequence
  Synthetic
SRLEKIKDDVKRLDDDSRRTLEEVHRRNKETARRVERLLEEAHRLNKKTVDEARS

SEQ ID NO: 17130 - protein, 58 aa, Artificial Sequence
  Synthetic
DEIRKIKTDVKEMVKKNREDVKRNNEDVKRVEDKLRKELKKNDDDVRRVLEELERRLR

SEQ ID NO: 17131 - protein, 60 aa, Artificial Sequence
  Synthetic
SEIEEVTRRLEELVKTVREVLREAHERTRRLVEKVRKLIEDVIRTNRKIKERVRELLERV

SEQ ID NO: 17132 - protein, 58 aa, Artificial Sequence
  Synthetic
DEIRKLRRRVEEVVRELEEELEKDRREVEKVIEELEREVDRSNEETRRVVKRLREEVE

SEQ ID NO: 17133 - protein, 60 aa, Artificial Sequence
  Synthetic
REKEEVRRKLREAERRVEEIDRRLEKLIRDVKRRVEEADRESEETSDRVRKEVERVDRRG

SEQ ID NO: 17134 - protein, 55 aa, Artificial Sequence
  Synthetic
EEVKERLKKVLEDNRRSIDELRRRIEEVLKENKRTVEEDKKRLEKVLEDVERRAR

SEQ ID NO: 17135 - protein, 56 aa, Artificial Sequence
  Synthetic
SDTEEVEKLTEEIVREVKRLDEEVKELIKEIRKESRRTLEEVRRLIEEVRDRVEKI

SEQ ID NO: 17136 - protein, 59 aa, Artificial Sequence
  Synthetic
SKDLERLRRELEEVLKENADSIRKLETELRDVLRRTREEAEKLKEELKDVLRRVEEKAK

SEQ ID NO: 17137 - protein, 60 aa, Artificial Sequence
  Synthetic
DEERKIREEAKRADDEIRRLLEENKRALDESNKRAEELVKRLADEVREALKRIEDLLRER

SEQ ID NO: 17138 - protein, 56 aa, Artificial Sequence
  Synthetic
VKKVVERLRRLIKEVKKRLEKIHEDSRRMVEESEKLLKEIVRKLRELIKEVEDKVK

SEQ ID NO: 17139 - protein, 60 aa, Artificial Sequence
  Synthetic
DEKEDLKRTAEESDREAKKLLDENRKRLEESNKKAEDLVRRNEETLRKVDTDIKDLLRKR

SEQ ID NO: 17140 - protein, 56 aa, Artificial Sequence
  Synthetic
VKKVLDELRRLVEESKELLKRIHDESEKMVEDSERLLEEVHRRSREVVERVREKIR

SEQ ID NO: 17141 - protein, 60 aa, Artificial Sequence
  Synthetic
SEKDRLSKRAAESDEELERLVRRNAEELDRSNKEIADLLKESKDTLKRAEDEIRRLLAER

SEQ ID NO: 17142 - protein, 56 aa, Artificial Sequence
  Synthetic
VEKVLKELEDVVKKSKELLERIHKESKEMVERSKRNNEKSLEDVRRLIERVLEKLK

SEQ ID NO: 17143 - protein, 60 aa, Artificial Sequence
  Synthetic
DEKRRLKEEAKKSDDELRKLVKDSADRLEDATRRIEELLRENAKRLEEAEKRIREELDKR

SEQ ID NO: 17144 - protein, 56 aa, Artificial Sequence
  Synthetic
VEEVLRRLKDLVERSKENNKRSLEEVERLIKEVEERLKRIHDESEKVVRTVEERLK

SEQ ID NO: 17145 - protein, 60 aa, Artificial Sequence
  Synthetic
REAEEIKKRLERVREEVEKELERIHRETDKIAKDVKRELDEIDKESKKVAEEIKKVAEEI

SEQ ID NO: 17146 - protein, 57 aa, Artificial Sequence
  Synthetic
KVDELKRRVEEVKRDLERKVRENNETIKKVKEDLRREVERNHKTIEDIKRELDERVR

SEQ ID NO: 17147 - protein, 60 aa, Artificial Sequence
  Synthetic
SEAEELLDRIRRVAEEVKRRLEEIHRTTRDIVRRIEELLKEIHERTREIVERIKRVLEKI

SEQ ID NO: 17148 - protein, 58 aa, Artificial Sequence
  Synthetic
DKVKRLEEEIRKIKRELEKIVRDNNEDIKRAKERLRKINKRNHDEIKKVKDELDETVR

SEQ ID NO: 17149 - protein, 60 aa, Artificial Sequence
  Synthetic
SEAEDLRRRIEEVARRVAEKLKKINRDTERIVRDVKKKLEEIHKRTEEVAEEVKEVLRRI

SEQ ID NO: 17150 - protein, 58 aa, Artificial Sequence
  Synthetic
DEVEELRKTIEDIRRRLEEEVRRNHDEIRKAEEELRELNRRNHERIKEIKEELDREVT

SEQ ID NO: 17151 - protein, 60 aa, Artificial Sequence
  Synthetic
SEVEKIDKRAKEVEKELEESNRRNRERIKEADERLRDLLRRNKEEIDRARKRLDEIVRRD

SEQ ID NO: 17152 - protein, 59 aa, Artificial Sequence
  Synthetic
KKRLKEVERRMEEIVKTVKKRSEDSHRESDEIVKRVLERLRKVHEETKEIVKRVEDRLR

SEQ ID NO: 17153 - protein, 60 aa, Artificial Sequence
  Synthetic
EEAERIDKKLEDEVREVERELEDVHRKVKEILEDVKRKHKKVHDELKKVIDEVKRKLEER

SEQ ID NO: 17154 - protein, 55 aa, Artificial Sequence
  Synthetic
KELEEKVRRIVRKLERRVEKNKDDTRRAVEEAEKLNEDNKRTSEKVEEDLRRTTT

SEQ ID NO: 17155 - protein, 60 aa, Artificial Sequence
  Synthetic
SEAEEIVRELRKAVEDVAREHKRIHEEVRKAAEDVKRKLKEILDRLERVVEEVARALEER

SEQ ID NO: 17156 - protein, 55 aa, Artificial Sequence
  Synthetic
DELREEAKEVVRDVRRLNEENRKATEDILRELKEIVERLERRAREVVKELKERAR

SEQ ID NO: 17157 - protein, 60 aa, Artificial Sequence
  Synthetic
DEREEIRRRLREDVKRVKRRLEEIHDEVRRLLEEVDRRLRKVHKELKEEVTEVEKRLRER

SEQ ID NO: 17158 - protein, 55 aa, Artificial Sequence
  Synthetic
RELKKEIDDVRKELEETVERNKRETERALRKAKEDLDRNREEVKRVVDELEKRTR

SEQ ID NO: 17159 - protein, 60 aa, Artificial Sequence
  Synthetic
SEKDEIRDELEKILRRVEELNRRIRKKLEEIRKEVERLLREIHEKLEEVVKEVEEKLRER

SEQ ID NO: 17160 - protein, 55 aa, Artificial Sequence
  Synthetic
EELKRRVEEVLKRARESLRELEEDVRRVLEEARKELERNRERVERVLRRLEETVR

SEQ ID NO: 17161 - protein, 59 aa, Artificial Sequence
  Synthetic
DEVEDLERRLKEVVDRSRRLDEELKRRDKKSVEDVRRKLEEVRKKLEDVARKLADLLRQ

SEQ ID NO: 17162 - protein, 55 aa, Artificial Sequence
  Synthetic
EKLERDVARAREENDRTLKEISKHSEKVLREVADMARKLRKEVKRIEDEIRERAR

SEQ ID NO: 17163 - protein, 60 aa, Artificial Sequence
  Synthetic
KLVEEVKREIEELVRRLEEVLDRVRRENERLAEELKKVVKDVEDNNERIARTVTELLKKV

SEQ ID NO: 17164 - protein, 59 aa, Artificial Sequence
  Synthetic
KEKVDELKRDVDRAEEKVRELIERIKRRSEEVKKRAEELLKKLEDDSRRVKKKLDDDAR

SEQ ID NO: 17165 - protein, 60 aa, Artificial Sequence
  Synthetic
SEVDEVRKEIKRLADEAREVVKEVRKNNEKIADDSRKLNERSIRESKKVTDTVRELLKRV

SEQ ID NO: 17166 - protein, 59 aa, Artificial Sequence
  Synthetic
EERVKELKERVDEVSKELRDLLKKLRDDSERVVEENEKLLRELKERSDRATKELDDASK

SEQ ID NO: 17167 - protein, 60 aa, Artificial Sequence
  Synthetic
KKAEKVDKEIEDLAREVREVLKEVEKDSDRLVKEVEDVLRRVKENNEDIRRRVSELDRRV

SEQ ID NO: 17168 - protein, 59 aa, Artificial Sequence
  Synthetic
EESVERLRRKVKEIEDELRELLERLRKKSEDAKRKLRELLERIKRDSERAKRELEERDK

SEQ ID NO: 17169 - protein, 59 aa, Artificial Sequence
  Synthetic
DTAREVKRKVKEIADEVRELIRRVHEETKKTSETVKKLIKEVHDTTEKIVREVRKLADE

SEQ ID NO: 17170 - protein, 59 aa, Artificial Sequence
  Synthetic
KKLVEELKREVDRISEELKRLLERNEREVRESKKTLERDLERNHEEIERAKRELDERVR

SEQ ID NO: 17171 - protein, 60 aa, Artificial Sequence
  Synthetic
REVDEVRKRVEKVAEEVRRLIEKVHRETERTSREVEKRIRDVHRRSDEVAREVDDLSRRV

SEQ ID NO: 17172 - protein, 59 aa, Artificial Sequence
  Synthetic
KKMVRTLAERVKEISEELKRRLKRNKDEVEESSRRLRELLKRNHDEIRRIKEKLKEETR

SEQ ID NO: 17173 - protein, 60 aa, Artificial Sequence
  Synthetic
EEVDRVKRKLEEVEKRVTEISKRTEELVEEVRKEVERISKRTEEDDRRVAKEVRERLKSG

SEQ ID NO: 17174 - protein, 56 aa, Artificial Sequence
  Synthetic
AKEIKEKVDEVIERLRRSNRKLHERIREVEKKLRELNERLHRHSREVIKELEERAR

SEQ ID NO: 17175 - protein, 60 aa, Artificial Sequence
  Synthetic
KEVEDILRDLERLSEESLRRNEEIHRELEELLRRVDEKNREIHKTLEEMVRRALTELRKR

SEQ ID NO: 17176 - protein, 59 aa, Artificial Sequence
  Synthetic
EKVVREVDRRVEESRKRLEKLLRENEKRVRDARRRARKLSEENERTVREVEKRAREEVK

SEQ ID NO: 17177 - protein, 60 aa, Artificial Sequence
  Synthetic
DEVEEIKRKLDKVADESRKLDEDIRDKLRRVADEIRRLHEESRKELEDVVREIERLLRER

SEQ ID NO: 17178 - protein, 59 aa, Artificial Sequence
  Synthetic
EKVIKEVRDTVEKILRENEKSLEEVRKTVKRIEEESRELLETSRDEVRRVLEKAEETEK

SEQ ID NO: 17179 - protein, 60 aa, Artificial Sequence
  Synthetic
SVADEIRKDLKRVADEVEERLRRLLEHNKKVRDEVKERVDESKKELKEVEEEVTEKLERI

SEQ ID NO: 17180 - protein, 59 aa, Artificial Sequence
  Synthetic
EKVVREIEERIRRVIRRLDEVDKTNEKISRDAARELEESDEELRRRVKEVKDRLDEKTK

SEQ ID NO: 17181 - protein, 60 aa, Artificial Sequence
  Synthetic
DEAEKIKKELDDVAREVERRLKELLDDNRRVAEEVEKRLRDSKRELEEVTRRVRKELERI

SEQ ID NO: 17182 - protein, 59 aa, Artificial Sequence
  Synthetic
KKLVDKIRDDIRRIARRLDEMNKKNKKLSDELEERLKKSNEEHRRRVEKVKEELEKKVE

SEQ ID NO: 17183 - protein, 60 aa, Artificial Sequence
  Synthetic
SEAEEIEKELREVAKEVRELMREMLKNNKEVAEEVKRRLERSRERLEEVEETVRDLLEKI

SEQ ID NO: 17184 - protein, 59 aa, Artificial Sequence
  Synthetic
DKVVKKIEDDIREVEKEARKLNRENRELSKKLAEELDRSNDRHRREVERVERELEKAER

SEQ ID NO: 17185 - protein, 60 aa, Artificial Sequence
  Synthetic
SLQERVRDKVRKVKKDLEDLNRRHREEIERVVRELDKSNEDHEREVRRVEKELEELIRRN

SEQ ID NO: 17186 - protein, 59 aa, Artificial Sequence
  Synthetic
KKFVEDVDRALKRIADEVKRRSEESKKELDDIKKEVEERLRESKEKLKRIVDEARERLR

SEQ ID NO: 17187 - protein, 57 aa, Artificial Sequence
  Synthetic
SELEEVIKRAEDELRDDERENKRVLEKSDRDIKRWEEEVKRVLKKARDELDKLRKEG

SEQ ID NO: 17188 - protein, 59 aa, Artificial Sequence
  Synthetic
KDVVEKLREELEKVLKESRDESKRLKEELDKVNDDARKRLEDLMRKLERVLEEVRRRRK

SEQ ID NO: 17189 - protein, 56 aa, Artificial Sequence
  Synthetic
SELERVIEEIRRALEEDHERNRDVLREAKEELERDKRRNDKVLTDIRKLVKDLERK

SEQ ID NO: 17190 - protein, 59 aa, Artificial Sequence
  Synthetic
EETVRRLTEELRKVLDEVTKRSKELSDRLREVLRRSKELSKELEKELRKVIKEADDRVK

SEQ ID NO: 17191 - protein, 56 aa, Artificial Sequence
  Synthetic
SEIERVLKEARDELRKDEEKNRDLLRRAKKVIEEDHKRNRDVLRRVKEELDRLREA

SEQ ID NO: 17192 - protein, 59 aa, Artificial Sequence
  Synthetic
KDALDRLRRELEEVLRRSKEESDRLAEELKRVLREIEERSRRLAKELKEVLDTAKRDKD

SEQ ID NO: 17193 - protein, 57 aa, Artificial Sequence
  Synthetic
SELERVIRENERTIREDMKKNEDVLREWEKLTRDLEDTIRRVLKKNRESLKRLKDKG

SEQ ID NO: 17194 - protein, 56 aa, Artificial Sequence
  Synthetic
RRELVKRLRDVDERSDDTSRKLKEELERVIRRTEELIRRVMEDAKRVDDEARKKTD

SEQ ID NO: 17195 - protein, 56 aa, Artificial Sequence
  Synthetic
SKVEEVLRELERRVKEDEDENRKVVRENERTVKEDEDTNRDALRRNEESIDKLRRD

SEQ ID NO: 17196 - protein, 56 aa, Artificial Sequence
  Synthetic
VDTLKRELDEALKRSEEESRRLKEEVTRIDERSKRESDRLVEEAKRLDKEAKDRSD

SEQ ID NO: 17197 - protein, 60 aa, Artificial Sequence
  Synthetic
SELEEVLKKAAEVIKEIEKRLRKVLEDSRRLTKEDEKRNKEVLKKLKEKIDEIEKRARDK

SEQ ID NO: 17198 - protein, 59 aa, Artificial Sequence
  Synthetic
DEVLRRLDRELKEVLDRVEREVERLKEENDRMNKKSKDDSEKLERDLERVAERLERELK

SEQ ID NO: 17199 - protein, 61 aa, Artificial Sequence
  Synthetic
SEAEKVLKEAREAAKRIEDEARKVLRESRELAKKAEEDDRRALKRAKEAAEKIKRDADRKG

SEQ ID NO: 17200 - protein, 59 aa, Artificial Sequence
  Synthetic
DKAIKEAADRLKKVLEDAEKKAREAAEENKRANEEWKKKSKRAAEEAKKVLDEAKKELD

SEQ ID NO: 17201 - protein, 59 aa, Artificial Sequence
  Synthetic
SDKERIKERVKKVHKESAKHIEDVRRRNEEINKRIKEEIDDVERRNREINEDIRRLVRE

SEQ ID NO: 17202 - protein, 55 aa, Artificial Sequence
  Synthetic
ERVIEDLERLIEENKRTLTEVIKRHRELLEDWKRRLDEVLKDHERSAREIDEEAR

SEQ ID NO: 17203 - protein, 60 aa, Artificial Sequence
  Synthetic
DEKEEVRRTVEERLKRVEDRVRELEKENEDINRELKERLKKVRRENEEINERLKKLLDEN

SEQ ID NO: 17204 - protein, 55 aa, Artificial Sequence
  Synthetic
EEVIRRVEEEIKRIEKRLRDVIKKHEDSVRKIRTDMERVVRDHERLAKKWEDDAR

SEQ ID NO: 17205 - protein, 59 aa, Artificial Sequence
  Synthetic
DEAKEIEDRVRTEIRDIERKVREARERSKRSDDELKKHSEEVARELEEILRELEEALRR

SEQ ID NO: 17206 - protein, 55 aa, Artificial Sequence
  Synthetic
KSVIDEVRKAVEDIARKLKKVLEDNKREIDKDRKRNEEVLRTAREKAEKIKEDAR

SEQ ID NO: 17207 - protein, 59 aa, Artificial Sequence
  Synthetic
DEKEKIKEDVRRVIRRIEEIVKRVDRESERSDRELEKHSRDVERRLREINDRLRRLLEE

SEQ ID NO: 17208 - protein, 55 aa, Artificial Sequence
  Synthetic
ERVIEEVKRLIDRIREELERVLEKNARLAKEDEERNERVLTENRKLIEDWEREAK

SEQ ID NO: 17209 - protein, 61 aa, Artificial Sequence
  Synthetic
SKLEEVVRRVDKDARDIRRRNEEVKRRNEKSAREIEKKVKKVLEEFRRLVEEIRKRLEEEG

SEQ ID NO: 17210 - protein, 59 aa, Artificial Sequence
  Synthetic
ERVLKELEERVRKVLKDNRDTSKELEERVRRIDEELDKTLRKAKEELRKIIRELEERLR

SEQ ID NO: 17211 - protein, 61 aa, Artificial Sequence
  Synthetic
SELEKVLERVKREAERIEKKNKKVLEENKKSAEEIHRDNERVLREVKDMADKIEDELRKRG

SEQ ID NO: 17212 - protein, 59 aa, Artificial Sequence
  Synthetic
RKVLRDVERRVKKILDDNKRTSDEMKKRLDRLDETNKRTSEKLEEDVRRIIEDLERRVK

SEQ ID NO: 17213 - protein, 60 aa, Artificial Sequence
  Synthetic
SKLEEVLKKLERLAREIERRLRDVIRRNKESADRIRKRNEEVLRKVEDVAREIEDKVRRG

SEQ ID NO: 17214 - protein, 59 aa, Artificial Sequence
  Synthetic
EEALRTLDKRVEDIIKRLKEEVDRVVRDLEELDKENEKSSREVEERLKEIIRELEETLK

SEQ ID NO: 17215 - protein, 61 aa, Artificial Sequence
  Synthetic
SKLEEVLKTLRRLIEEIKKRLKKVKDDNKKSLEDIHRKNKRVLEELEKRLRDIDKKLKDKG

SEQ ID NO: 17216 - protein, 57 aa, Artificial Sequence
  Synthetic
VLKEVEERVERIIRELRRRVEELKRRVEELDRRNEKTSDDLEEELKRIDKELKDRTD

SEQ ID NO: 17217 - protein, 60 aa, Artificial Sequence
  Synthetic
SKVEDVVRRVAEVAERIRRRNEEVAEENERSLKEIHDENKEVVERARKMAKRIEDEVRRK

SEQ ID NO: 17218 - protein, 59 aa, Artificial Sequence
  Synthetic
EEVLKTVADEVREILERNEKTSEELAERVRRLDEENRRTSREVEKRVEEVIEDLKRRLK

SEQ ID NO: 17219 - protein, 61 aa, Artificial Sequence
  Synthetic
SEVDKLEEDLRRIIKEIRRLVEEVKRKSEEIDRELKRLLEEAERTLEEIDRKLEDELRKKG

SEQ ID NO: 17220 - protein, 58 aa, Artificial Sequence
  Synthetic
DKVREVKKDVEKKLKELEEELRDITRRNRESLKRLEERLKEVAKKNRKTVDELRKELD

SEQ ID NO: 17221 - protein, 61 aa, Artificial Sequence
  Synthetic
DEVDDLKRRLEKIITEDEKLVKEVKDRSEKLDREIAKLLEDARRALEKLDKELEEILRKKG

SEQ ID NO: 17222 - protein, 58 aa, Artificial Sequence
  Synthetic
DKVREVVKRVRDEADKSRRKLEEITRRNRDSLERIKRKLERVLEENDRTLRELEERAR

SEQ ID NO: 17223 - protein, 58 aa, Artificial Sequence
  Synthetic
SELEKVVEDSRRKLDAWDDESRRVAEESRRRLEEWRKRLEEVAKRVEERLRDLKRKAG

SEQ ID NO: 17224 - protein, 59 aa, Artificial Sequence
  Synthetic
EELVKKMARELDELNKDLDRLNKESKRELERLNTELAELIKEVERELRELLRKLEEDLR

SEQ ID NO: 17225 - protein, 58 aa, Artificial Sequence
  Synthetic
DSLEDVVRRVKKKLDDNRKDVERVAKESEELLKRWRDRVKKVVRDVERRAEELRRRRG

SEQ ID NO: 17226 - protein, 59 aa, Artificial Sequence
  Synthetic
EELIKTFERTLEELHKTNKKLNEEVKKRLEELNTRLAKLIEDVRKELEKVLKELEDRAR

SEQ ID NO: 17227 - protein, 58 aa, Artificial Sequence
  Synthetic
DELDEVVREVKDRLRENKEEVKRVMDESRRLLERWNEESERVAKKVEEAVRKLTKDKG

SEQ ID NO: 17228 - protein, 59 aa, Artificial Sequence
  Synthetic
EDDIRRITKRLRDLHRENEKLNRDVKKELRELNERLAKLNRDSTRELEELLRKLEEDAR

SEQ ID NO: 17229 - protein, 58 aa, Artificial Sequence
  Synthetic
SELDKVVEESKRLLEEWDRRSKDVAKKVKEMLDRSRKASKEVVKEARDELERLKRETG

SEQ ID NO: 17230 - protein, 59 aa, Artificial Sequence
  Synthetic
EKDIREIKERLKRLNETLAELNERSKKRLKRLLDEDKKLNDDSSKELKELLKELEDRTR

SEQ ID NO: 17231 - protein, 58 aa, Artificial Sequence
  Synthetic
RELEDVARRARKKLEDNKRRVEEVAEEVERRLDESRKESDKVVREVEEVLKRLKEERG

SEQ ID NO: 17232 - protein, 59 aa, Artificial Sequence
  Synthetic
EELVKRMTEELERVHRENEKLNRDVRRELEDILRKDEELNKRSKKRLKDLLDELRRRLT

SEQ ID NO: 17233 - protein, 58 aa, Artificial Sequence
  Synthetic
SELEEVVKKVRTDLDRIDEKSKRVAKEVDRVLKESEDRSKKVAREVEEVLRKLKEEAG

SEQ ID NO: 17234 - protein, 59 aa, Artificial Sequence
  Synthetic
EDLVRRAVETLERLIRELEKLNDESKRRLEEILREDKRLNKESTEELRRLLEELRKTLT

SEQ ID NO: 17235 - protein, 58 aa, Artificial Sequence
  Synthetic
SEVERVAEELKRVLKELEDLDRESEKKLKRLNEELARLIEEVRRRLEEVLRTLEELAK

SEQ ID NO: 17236 - protein, 58 aa, Artificial Sequence
  Synthetic
REVEEVIRRIDEAIKRIEKHSREVIERSRERVEDWRRKVERVIEEVERRARKLREDTR

SEQ ID NO: 17237 - protein, 58 aa, Artificial Sequence
  Synthetic
SEVEKVAEEAKRVLDELEKLDRDSAKELKDLNDELRKRDKESEDALRKITRDLDELDK

SEQ ID NO: 17238 - protein, 58 aa, Artificial Sequence
  Synthetic
KDVEKVIRDLKRELERLAKHSEEVIRTSEELLKRWEDHSRKVIEEVKERARDIKRRTK

SEQ ID NO: 17239 - protein, 57 aa, Artificial Sequence
  Synthetic
SELEKVVKEVEEALERNNRENRRVIRRSRELLKRWREEVEEVVRRLRERAKKIADDV

SEQ ID NO: 17240 - protein, 59 aa, Artificial Sequence
  Synthetic
EEEVRKLEEDLRRILEEIDRESDRLVKRIEDLNRRVAELLKRVEEELEDLARKVEEEAK

SEQ ID NO: 17241 - protein, 60 aa, Artificial Sequence
  Synthetic
SIEEIVEEIERELEKLKRKLDELIKRSEELSRRLAEKTRRSNEEIKREIDKVADDIRKTL

SEQ ID NO: 17242 - protein, 59 aa, Artificial Sequence
  Synthetic
EDTIRRVLEEAREEIKKLERDVDKVRKEVEDAHRKNSELNKTVHDEVRKIIDEIRKEVK

SEQ ID NO: 17243 - protein, 60 aa, Artificial Sequence
  Synthetic
SIEEILREIEELIKDLLRKAEELLKESEKRSKELKDEMKRSNEEIRKLIEDLRRRAKDRV

SEQ ID NO: 17244 - protein, 59 aa, Artificial Sequence
  Synthetic
EDVIRDLLRRVREDIDRLRKELEKVVRELRRIHEEVRRDLKRVHEEVRKRIEDLEEELK

SEQ ID NO: 17245 - protein, 60 aa, Artificial Sequence
  Synthetic
KEVEDVVRRVRKLIEDNERRNKEVHEEVEKRARENVERNRELLEKIRRTVEEIRRELEEL

SEQ ID NO: 17246 - protein, 56 aa, Artificial Sequence
  Synthetic
KDLLDEVRRLLERVKRRTEESNRRVKKIVDDVKRTSEEILREVEELLRRLIDDARK

SEQ ID NO: 17247 - protein, 61 aa, Artificial Sequence
  Synthetic
DEVEKVFREVKKRIDENREKNRRVHEKVEREARRNSEENRRVHEEVRKTVEDIRRELDEKR

SEQ ID NO: 17248 - protein, 56 aa, Artificial Sequence
  Synthetic
EELLRRIEKLAREVRDETRRSNEKVKEIIRRVEKESEDSNREVKRLLDELTRDARR

SEQ ID NO: 17249 - protein, 60 aa, Artificial Sequence
  Synthetic
SEVEDVVRKAREILKRNEDENRRVLEKVREDLKRLTDENDKVVEDVREMVRRIKEMLDRN

SEQ ID NO: 17250 - protein, 56 aa, Artificial Sequence
  Synthetic
EELLREVDERIKDVKRKTDEILREVRERIKRNEERTERLRREIEELARRLLEDAER

SEQ ID NO: 17251 - protein, 59 aa, Artificial Sequence
  Synthetic
DEEDLLEKIERILEEVKRRLEDVIRRVRKSNEDIERELKKAVDRSRELLRKVEEDLRRN

SEQ ID NO: 17252 - protein, 55 aa, Artificial Sequence
  Synthetic
RDVFERLERIARRLTEEIEKALRDSDKLNEELKRKVEEVLRRSEESIRTVLEELR

SEQ ID NO: 17253 - protein, 60 aa, Artificial Sequence
  Synthetic
DEIEKVRKDVDEIIRRLEEELEEVAKRLEDLNREIERILREVKKESDDTIRTIERLRKEG

SEQ ID NO: 17254 - protein, 56 aa, Artificial Sequence
  Synthetic
ESIVKEVRDKLRRLEKRLDDLAKRNEESLRELKRTLEEIIKRSRKENKRIEDEVRK

SEQ ID NO: 17255 - protein, 60 aa, Artificial Sequence
  Synthetic
SEVEEVEKELRELIREDKERLDRLRKELKESIDTNKEKLDRVKEDLERLIEEIREEARRR

SEQ ID NO: 17256 - protein, 59 aa, Artificial Sequence
  Synthetic
RERLTKLVEKIREVLERSKEHSERVAKKIRDELDKLHKETERVDRKLKTEARRLKEELR

SEQ ID NO: 17257 - protein, 60 aa, Artificial Sequence
  Synthetic
DEVERVEEELKESIDRNDEELRRVRKENRESIEKDRRDLKRVEDDLRRLIKKIDEEVRRR

SEQ ID NO: 17258 - protein, 59 aa, Artificial Sequence
  Synthetic
EEALREVVRKLRKLLKELHEETKRVMEKLRKLDRESEEHTKEVDERIKKTIEDLERELK

SEQ ID NO: 17259 - protein, 60 aa, Artificial Sequence
  Synthetic
SEVDEVRKELRKVIKEDEDTMRKLEEENRKSIEEIRKELEKVEEELERVIRRIEDEIRKR

SEQ ID NO: 17260 - protein, 59 aa, Artificial Sequence
  Synthetic
REVLETLVRKIREELKRSKEHSKRVADDLRRMDEEIRREVKRVVDKVRELLKRLEDELK

SEQ ID NO: 17261 - protein, 60 aa, Artificial Sequence
  Synthetic
DEVEDVLRRLKELAEEDKTKLKEVEKENKESIKEDRKRLEDVRRELEKLIEEIRREVTER

SEQ ID NO: 17262 - protein, 59 aa, Artificial Sequence
  Synthetic
EKVLRDVSRRIKEEVEKSKKHSEEVKKELEDADRESKRHTEEVEKKIRELIERLKRETK

SEQ ID NO: 17263 - protein, 61 aa, Artificial Sequence
  Synthetic
DEIDRLREELKRLIDKDKTDLDRVRKENEESIRDDERKLREVEKELRDLIEEIRRKAKERN

SEQ ID NO: 17264 - protein, 59 aa, Artificial Sequence
  Synthetic
RRVLEEVARKIRELIRRSEKHSEDVMEKVRRNDERSKRHTEDVTRKIRTEIEKIDRELE

SEQ ID NO: 17265 - protein, 60 aa, Artificial Sequence
  Synthetic
KEKEDVKKRLDEEAEKNKRTSEEAKRRNRESIRRNKETSKRVKEENRRSFEELDDLLRRG

SEQ ID NO: 17266 - protein, 55 aa, Artificial Sequence
  Synthetic
KRVEEELDKLMEEIRRHNRESNEELKRLVEEIRKHNRESNEELKKLLEEIERKTE

SEQ ID NO: 17267 - protein, 60 aa, Artificial Sequence
  Synthetic
DEDKDVEKKLRDIIKRNKETSRDVARRLEEIIKRNKKTSDEVATEVRKLIKEIEDVLRRG

SEQ ID NO: 17268 - protein, 55 aa, Artificial Sequence
  Synthetic
EKVKEELRRLIEEIKEHNERVLRKLRKLVEEIERTNEDIRRELKELVEDIRRKAK

SEQ ID NO: 17269 - protein, 60 aa, Artificial Sequence
  Synthetic
SEKEEVRKRLRDKVEDNKRTSKEVADKLRKIIKENKDTSKKVMEDLRRIIEEADELLRRG

SEQ ID NO: 17270 - protein, 55 aa, Artificial Sequence
  Synthetic
DDVRRELDELVKRIAEENKRVEDELRRLVKEIEDHNEEVKRELKELVKRIEEKTR

SEQ ID NO: 17271 - protein, 60 aa, Artificial Sequence
  Synthetic
SEKEEVEREVEERLRDNKRTSDKVVEENRDSVRRNKKTSEDVKRENEESVRRIDEVLKRG

SEQ ID NO: 17272 - protein, 55 aa, Artificial Sequence
  Synthetic
EDVKRKAKRMVEEIRERNRKSNEELKKLAEEIRKHNKDSNKKLKELVDEIRRKAK

SEQ ID NO: 17273 - protein, 60 aa, Artificial Sequence
  Synthetic
DEERRVREKLKKIIKDNEDTSRKVREDVKKELDDNRRTSEKVARDNERSIEEIKKALERG

SEQ ID NO: 17274 - protein, 55 aa, Artificial Sequence
  Synthetic
EEVRRELDKLVKEIKERNDEVIEEARERVKRIREKNERSNRKLKKEAKKIEEEAR

SEQ ID NO: 17275 - protein, 60 aa, Artificial Sequence
  Synthetic
DEDREVERDLKKIIKDNKRTSEEVEKKLRDIIRKNEKTSKEVEKELRDIIRRADELLRRG

SEQ ID NO: 17276 - protein, 55 aa, Artificial Sequence
  Synthetic
EEVKKDLDRLAEEIKKRNEEVRKDLDDLVRKIEKRNEEVKEELDRLAREIEEKAR

SEQ ID NO: 17277 - protein, 60 aa, Artificial Sequence
  Synthetic
SEEDEVRRRLRRIIEENRRTSEEVRERLRKIVEDLERTSRDVRRKLREIVERIKEVLTRG

SEQ ID NO: 17278 - protein, 55 aa, Artificial Sequence
  Synthetic
REVEEELRRLIEEIERRNKEVREELDRLIEKLEDDNRKVHKELRELAKEIKDRAD

SEQ ID NO: 17279 - protein, 60 aa, Artificial Sequence
  Synthetic
RELEEVVKRIRDILREIHERSEKSAEENRRLIEKAEEDSKRSAKRIREIIREIREEVKRI

SEQ ID NO: 17280 - protein, 62 aa, Artificial Sequence
  Synthetic
RDVREKLERVAREVEKSNKDNRDHSKRVEEESRELLKKLRKHSEDVAREVKKLLDELREETR

SEQ ID NO: 17281 - protein, 60 aa, Artificial Sequence
  Synthetic
SELEKVVEDIRRLLRKIHEDSKRSVRKNEELVEELKRLSEKSEREIEELLRRIKELLKRI

SEQ ID NO: 17282 - protein, 62 aa, Artificial Sequence
  Synthetic
ERVKRKLDDVEREVRKSNEDNRKHSDEVRRKSEDMLEKLRRESERVADRVRKVLKELEDERR

SEQ ID NO: 17283 - protein, 60 aa, Artificial Sequence
  Synthetic
SELEKLAKEIEEILREAKERSKESAERIRKLVRDLRELSRESEERIRKIETDVKKKIDDI

SEQ ID NO: 17284 - protein, 62 aa, Artificial Sequence
  Synthetic
REVRRKVEDVERRVTKVLKELEDRSREVEEEVERVLRDLKRHSDEVRREVEEVLRRLTERTK

SEQ ID NO: 17285 - protein, 59 aa, Artificial Sequence
  Synthetic
SEREKIAEDIRKLVDESRRNLEDVVRRARELAERVRRNLKRVMETLERLAEEIRRIIES

SEQ ID NO: 17286 - protein, 55 aa, Artificial Sequence
  Synthetic
KDLERELKELLDKHKKDLDDVREEIRRMLETHKEELDRVKKRVEDVLREAAERTR

SEQ ID NO: 17287 - protein, 59 aa, Artificial Sequence
  Synthetic
DERERIREEVRKLARESKENLKRTEEDLKRRLEEVKRNLERVDEEVERLVRTVAEIVRK

SEQ ID NO: 17288 - protein, 55 aa, Artificial Sequence
  Synthetic
EELKKEAKKLLKEHRDKVKEIKEDLKRAHEEHRKRLEEVVEKLKRVLRDLAEKVR

SEQ ID NO: 17289 - protein, 59 aa, Artificial Sequence
  Synthetic
SEREEIVKTLRELVKRVKENLKRVTEEARKLADESRRNLERVAEEIRKIAEEVKRIVER

SEQ ID NO: 17290 - protein, 55 aa, Artificial Sequence
  Synthetic
KDLEKELEDVHREHKRRLDEVVREMEDLLRKHEDDLRKVKREAEKMLKELTETTK

SEQ ID NO: 17291 - protein, 59 aa, Artificial Sequence
  Synthetic
SEREEIAERAERLSREVKKKLEDIRREIEELAKRVLDNLRRVLRDVERLIEEVKDIIRR

SEQ ID NO: 17292 - protein, 55 aa, Artificial Sequence
  Synthetic
KKLKDDLDRADEELERRARKVDEDLKELHERHRRLLEDVRRELERVIKELKEETE

SEQ ID NO: 17293 - protein, 59 aa, Artificial Sequence
  Synthetic
SDRERIAKRARELSERVKEKLEEILKEVRKISKDMKKRLEDILREAEELSRRIKEIVES

SEQ ID NO: 17294 - protein, 55 aa, Artificial Sequence
  Synthetic
DELRKELEEVDDELRRKIEEIKKELETMDKELRDRAKEIEKRLEDSNREVEERRR

SEQ ID NO: 17295 - protein, 59 aa, Artificial Sequence
  Synthetic
SEREEIAKTVRKLSREMKETLKKITEEARRLSEEVKRALKKIVDDLRELMKDVKRIVES

SEQ ID NO: 17296 - protein, 55 aa, Artificial Sequence
  Synthetic
KDLKKELEDVDRELADTIRRVEEELKKVNEELRKRVEDVREEAERALRELEERVR

SEQ ID NO: 17297 - protein, 59 aa, Artificial Sequence
  Synthetic
DERERIAEELKKLTEEIRRRVEDVMREAERLAEEIKRKLEDVLEEVRRLSDRIREIIES

SEQ ID NO: 17298 - protein, 55 aa, Artificial Sequence
  Synthetic
DDLRREAEKVNRKVREDLKRIEDRMRELLKEVEDLLRKIEEEARKSNKELEDRTR

SEQ ID NO: 17299 - protein, 61 aa, Artificial Sequence
  Synthetic
SEAEKAREDVERAAKESKDKLDEIRKEVEKAARESREEAKRNEKDIKDAAKKLRELARDKK

SEQ ID NO: 17300 - protein, 55 aa, Artificial Sequence
  Synthetic
RDVLEELRKIAEDDKRRVDKVARELRELAKRDKEEAKKVHDENKKSAKEAEDELR

SEQ ID NO: 17301 - protein, 60 aa, Artificial Sequence
  Synthetic
SSDETLRRELEKAVEESRRLLEENRKTIEDMVRESKRLLDRNREEIKKLVEELKKLLRDN

SEQ ID NO: 17302 - protein, 55 aa, Artificial Sequence
  Synthetic
RDVLREIRELLKRDKERLKEVHKRNRESAKRDKDRVKDVHRKNRDSARRVKERLR

SEQ ID NO: 17303 - protein, 60 aa, Artificial Sequence
  Synthetic
SSDETARKEIEDMVRESKKLLEEIREELDRVVKRLRRELEENEKDIKRLVKRLRDLLREN

SEQ ID NO: 17304 - protein, 55 aa, Artificial Sequence
  Synthetic
RDVLREIRELAKRDKDTVKKVMEEIRDRLRKLDERIKEVHERNRRSLKDVEDKVR

SEQ ID NO: 17305 - protein, 60 aa, Artificial Sequence
  Synthetic
DEDREAKRRLDEAVKESRDRLEEIRKEVEKMVRENEELNRRNEEEIRKAVEELRELLRRQ

SEQ ID NO: 17306 - protein, 55 aa, Artificial Sequence
  Synthetic
RDVLREIEEELTKDRKRVKEVLEELRRIAKRLKERDEESHERNRRSLDKLKKEVK

SEQ ID NO: 17307 - protein, 60 aa, Artificial Sequence
  Synthetic
SSEDEARKEVDKMAKESEELLRRNEETIRRLVRENEEKNERNRREIERVVRELDRLLKER

SEQ ID NO: 17308 - protein, 55 aa, Artificial Sequence
  Synthetic
RDVLRELREIAERDKKKVEDVHRENRDSARRLKEEDDDSHRRNRKSMKEVKEDVE

SEQ ID NO: 17309 - protein, 60 aa, Artificial Sequence
  Synthetic
REIEEVAKRLRKLVKELKERSKESKDRSRKLMTELKKLSKDSLRELRRLLDELRKILKDR

SEQ ID NO: 17310 - protein, 62 aa, Artificial Sequence
  Synthetic
RDVKKKLDEIRREVKKVIEEDKRLNDESEKDSRRLIREDEDENRRIKEEIDRAVEELRRRRK

SEQ ID NO: 17311 - protein, 60 aa, Artificial Sequence
  Synthetic
SDIERVLEELRRLVERLKRETERFAKELRDLARRVKEMSKRSEEELRELATRLKDTLRRR

SEQ ID NO: 17312 - protein, 62 aa, Artificial Sequence
  Synthetic
RDVEEKLRRIKRELREVIKEDEKRNREIEREVDKVIRELEKLNKRIEDEVRKLEEELERRLK

SEQ ID NO: 17313 - protein, 60 aa, Artificial Sequence
  Synthetic
SDIERMRDRLRKLVEEAREKSDRSREELEKLVRELRRKTEKFLKELRDLARRLKETLKRR

SEQ ID NO: 17314 - protein, 62 aa, Artificial Sequence
  Synthetic
RDVKEKLDRIRKEVEEVARDLKRKNDEIEEEIKKVIRDDERRNEEIEKEVRKMAEELRRTLK

SEQ ID NO: 17315 - protein, 60 aa, Artificial Sequence
  Synthetic
SDIERVRKELRELLERVARRSEKSMRDDKKSMDDLKKEIREVEEELRRLATEVKKTLKDR

SEQ ID NO: 17316 - protein, 62 aa, Artificial Sequence
  Synthetic
RDVKKKLEEIEREIREAIKDLRRKNREIERTNREVIKELREELKRIDTEVKKLVKELRETSK

SEQ ID NO: 17317 - protein, 60 aa, Artificial Sequence
  Synthetic
SELEELERDLERELEEDKRRNEEVMERNERRLRKLKEDVDRVVKELEDLLRKLEKILREE

SEQ ID NO: 17318 - protein, 59 aa, Artificial Sequence
  Synthetic
ESELERLDRRLKKLIKESRETVDEIEERSERAIRDLERKLKELEERLRKKIKELRDETR

SEQ ID NO: 17319 - protein, 59 aa, Artificial Sequence
  Synthetic
DETKKVEDDLRRVDTESKKHLDDVHKESKRVADELRKKLEDVHRRSEEMVRRLRRLLEE

SEQ ID NO: 17320 - protein, 55 aa, Artificial Sequence
  Synthetic
EEVKKRIDDALRENERRAEENRREIERVLKELEDRVDENRRRIEEVRKELRDRAT

SEQ ID NO: 17321 - protein, 59 aa, Artificial Sequence
  Synthetic
DETREVDERLKEADRRSKKHLDDVHKTSKKVLDELRRKIEELERRVRKVVKELEELLRE

SEQ ID NO: 17322 - protein, 55 aa, Artificial Sequence
  Synthetic
EDVRRKVDKIIKENRKMLEDNKRTIEEVLRELKERADEIKERVKKVLKKLEEDRR

SEQ ID NO: 17323 - protein, 60 aa, Artificial Sequence
  Synthetic
DEEEKVERDVERVDKESKEHLDRVHEETRDINRRSEEHLRRVHRDSEDVARRLRDAVRRR

SEQ ID NO: 17324 - protein, 55 aa, Artificial Sequence
  Synthetic
EKVKRRVEEAIKRNRDEARRDEEEVKKAIKRNREEADRNRREIEKVVEELRRRAT

SEQ ID NO: 17325 - protein, 60 aa, Artificial Sequence
  Synthetic
SEKEEVKRRVDEITKRARKKLEDVHRRSEKIDRDSREHLERVHKRTKEILDELRDELRKR

SEQ ID NO: 17326 - protein, 55 aa, Artificial Sequence
  Synthetic
EDLRRRLEKVFRELKETLDRNREEIDRMVKRNRKTLRDNKEEIDRAVREARERLK

SEQ ID NO: 17327 - protein, 60 aa, Artificial Sequence
  Synthetic
REDEEVLKDLKRIVDELRKKLKELHDRSEEIDKRSKKHLDDARRRVEEIMRRIEKRLREE

SEQ ID NO: 17328 - protein, 55 aa, Artificial Sequence
  Synthetic
DKVRKDLKDVAKEMRDRLEENERRIREAAKRNRTELERIERELKEFKDRLDETAR

SEQ ID NO: 17329 - protein, 60 aa, Artificial Sequence
  Synthetic
SEVEKVMEEAKRIVTELEEKIRELERKVKKIDEDSRRHLKEVHDRTAEIAKTLRDILRKE

SEQ ID NO: 17330 - protein, 55 aa, Artificial Sequence
  Synthetic
DKIRREIEEAVERLETEARRLRREVEEAVRRNREMLKRNEKEIKDVAKELRDRLR

SEQ ID NO: 17331 - protein, 60 aa, Artificial Sequence
  Synthetic
REDDRIRDEIRKLVEDNRRLLREILERLKTLADRLREINKKSNDDNERSADELREVLKKV

SEQ ID NO: 17332 - protein, 55 aa, Artificial Sequence
  Synthetic
EEVRREVEKAIRDSKEKLDELEERVRRMIEESEKLVEDNHRRIEEVEREMEEALR

SEQ ID NO: 17333 - protein, 58 aa, Artificial Sequence
  Synthetic
KDEEEIKKAIEELVKRNEDIVEEIKRRSDKLADDLRDINRRSNEDNDRSLKTLEELLR

SEQ ID NO: 17334 - protein, 55 aa, Artificial Sequence
  Synthetic
KEVRDRVRRAIEKSKEDLDKSEDDSRKVIEESKRLVEENHRRIRKAVRKAEEATR

SEQ ID NO: 17335 - protein, 59 aa, Artificial Sequence
  Synthetic
SEEEEARKKLKEAADRNRKVNEDAKKKAEDAARKNKKANEELAKKLKDAAEELKRVSRD

SEQ ID NO: 17336 - protein, 55 aa, Artificial Sequence
  Synthetic
EEIKERAKEVLERHKRSAEKIKEEAKRVLDEHRKRARDWEEEARRVLKEAEEEAR

SEQ ID NO: 17337 - protein, 59 aa, Artificial Sequence
  Synthetic
REEEEVRKEVKKLKKENEDVNDKVRRDLEELLERNRKVNKELEDKIRDAKRRADEMLRV

SEQ ID NO: 17338 - protein, 55 aa, Artificial Sequence
  Synthetic
EEIEEELRKVLKEHKELVERWKREAEEVLEESKRLIDKWKEDLERVLEDFRRKAE

SEQ ID NO: 17339 - protein, 57 aa, Artificial Sequence
  Synthetic
SEAEEIEKRLKEVLDRHDKSAREIKDRLRKVIEEHRKLVEEWEKEARDVVKELKDEN

SEQ ID NO: 17340 - protein, 56 aa, Artificial Sequence
  Synthetic
TRRLRERLRKMEEDNRKINKEIRDEVKELEKENREINKRVEEELKRVRDELKRTAD

SEQ ID NO: 17341 - protein, 57 aa, Artificial Sequence
  Synthetic
DEVEDIKRELEEVVKEHEKSVEDDERKNEDVVRRHDELVKKWEEDLRRVIEKLKRDN

SEQ ID NO: 17342 - protein, 56 aa, Artificial Sequence
  Synthetic
ERDLRRRVKDLKRRNKEMNERSKKHSDEVKEENKRINEEVEKKLRDVKEKLDRDIK

SEQ ID NO: 17343 - protein, 59 aa, Artificial Sequence
  Synthetic
SELEKLIKEVEDLAKEVADKLRKSNKELRELVRKIAKALEETNREIEKVVRRVKRLLES

SEQ ID NO: 17344 - protein, 57 aa, Artificial Sequence
  Synthetic
KLKKIKEDLKRIADEIRKIVEDSKRDLERVADEARKIVEKSKEDLKRAKEEAEKETK

SEQ ID NO: 17345 - protein, 59 aa, Artificial Sequence
  Synthetic
DELDELTKRARELVERNRRHIERSNRELKRLVKEVLDRNRENHKTVEELVKTVLKLAKD

SEQ ID NO: 17346 - protein, 59 aa, Artificial Sequence
  Synthetic
RSDVERVRKELKDSTDDIKRLVDKSREDLKRAKEKDEKSVRDNRERLRRVLRRLEEEVR

SEQ ID NO: 17347 - protein, 59 aa, Artificial Sequence
  Synthetic
SELEKLTKEVRDDVRRVMERLKRSNDDIRRLAEEVIRRNDESRKKLEKLVEEVKDLFRR

SEQ ID NO: 17348 - protein, 57 aa, Artificial Sequence
  Synthetic
KVREIERELDEVRKRLEDLVRKSKEDLDRVREELERLVEKSKRDLDKARRDLDEARR

SEQ ID NO: 17349 - protein, 59 aa, Artificial Sequence
  Synthetic
DELEELEKKVREDVRRVKEKMERSHRETEKLARDVKKRLEDTNREIKKLVKEVEDILRR

SEQ ID NO: 17350 - protein, 59 aa, Artificial Sequence
  Synthetic
KSKVEKVRRDLDEARKRLEELDRRNRKRLEEVRKEIREIVEKSKEDLKRAKDRARETVR

SEQ ID NO: 17351 - protein, 59 aa, Artificial Sequence
  Synthetic
SEAEALIEEVKTLVRRNKEHAKRSHEKTEKLVRDVADALRKTNDEARKLVEEVRRILES

SEQ ID NO: 17352 - protein, 59 aa, Artificial Sequence
  Synthetic
KSKLERLKRELTRSAEELRELDKRNEDELRRAAKRIRDIVRKSEEDLKKVRDDAREKTR

SEQ ID NO: 17353 - protein, 60 aa, Artificial Sequence
  Synthetic
KDVEEVRKELDEIARRVTEEIKRVHDETARIVDRLRERLEKVTRDNRRSVRELEKELERN

SEQ ID NO: 17354 - protein, 59 aa, Artificial Sequence
  Synthetic
EKKLREAKKRLDELAERLKRLIDRNREEIKRVAREADERIRENEKEVEEVEERLDRKIK

SEQ ID NO: 17355 - protein, 60 aa, Artificial Sequence
  Synthetic
KDAEKVVEDLERKADAVMRKLEDVSRRHREIAKRIKDRLEKVHRDNEKSVEDLKRILKRN

SEQ ID NO: 17356 - protein, 59 aa, Artificial Sequence
  Synthetic
EEIVRRAEKKVEDFERRLRKLIEDNKREVDKVEKELRDTIRRNEERIREAVEELKRTSD

SEQ ID NO: 17357 - protein, 60 aa, Artificial Sequence
  Synthetic
EDVRRVVEELRKIAEDAKEKARRVHERDRERVRKVEEDAKKVHEENEESVTRLERLLDRR

SEQ ID NO: 17358 - protein, 59 aa, Artificial Sequence
  Synthetic
EDDVRRIREEVEKVRKDLKDIVKRNKEANDEVEKRLRDIVRRNRERIEEMRRRLEEKKR

SEQ ID NO: 17359 - protein, 60 aa, Artificial Sequence
  Synthetic
EDVKRVVKELEDIAEEVRRRLEKVNRENRESMKRLEEELRKVHEENRESIERLKRTLKDR

SEQ ID NO: 17360 - protein, 59 aa, Artificial Sequence
  Synthetic
EEIVKEAKERVDKVKDDLRRLIEENERDIRRMDRKLEDEIRRNDEELRRVVREAEETVR

SEQ ID NO: 17361 - protein, 60 aa, Artificial Sequence
  Synthetic
SDVERVRRELREIAETVKERLREVNERNRKSVRDVEEIVKKVHEEDKDLARKVEEILERN

SEQ ID NO: 17362 - protein, 59 aa, Artificial Sequence
  Synthetic
KERVDDIKREVDKAREDLRRLIEENKRDIKEVVERLEKLIKDNRDDNDRLRRRLEEKSR

SEQ ID NO: 17363 - protein, 60 aa, Artificial Sequence
  Synthetic
SELEKVEKELKRIVDEVKKELKRVHEDDERLVRELEESLKKVTEDDRRLARELEDTLRKR

SEQ ID NO: 17364 - protein, 59 aa, Artificial Sequence
  Synthetic
EEDARRAEERVRRVVKELKELIERNKKRNKEAVERLRRLIEENKRENREVEKRARDTAR

SEQ ID NO: 17365 - protein, 60 aa, Artificial Sequence
  Synthetic
KDAEEVLERLKKIAEEVAKELRDVDEENRRLLKRWAEILEEVTREDERLARELEERLERR

SEQ ID NO: 17366 - protein, 59 aa, Artificial Sequence
  Synthetic
EEKLRRAKEEVDRAEKELRELIKRNKDNLERAVRELEKLIEENERRNREVEKRLEDRER

SEQ ID NO: 17367 - protein, 60 aa, Artificial Sequence
  Synthetic
KDVEDVVRRLEEIAKRVKERLKEVDKRNKDKAREWLKEVKEVHERNEKLAEEVRRTLKDN

SEQ ID NO: 17368 - protein, 59 aa, Artificial Sequence
  Synthetic
EEIVREAEKRVREMERELRELIERNKRNVEEMDRRLEELIKENEERNKRVEEDLRRKTK

SEQ ID NO: 17369 - protein, 60 aa, Artificial Sequence
  Synthetic
DEVEEAKRRLTELVDRLRKTLEKVSREDRELEERVRKITKDSHDTTEEILKRLKRELEKG

SEQ ID NO: 17370 - protein, 59 aa, Artificial Sequence
  Synthetic
EKDLRELEERVRRAVKKLRDDLRRNKKESEEVKKKLEDENKKNRDRVAEAEEELRRRTT

SEQ ID NO: 17371 - protein, 59 aa, Artificial Sequence
  Synthetic
DEVREMLRTLDEIARRLKKRTKESIDTDRRLVKKLREETDKSIEDDKKLVKEVEELLDG

SEQ ID NO: 17372 - protein, 59 aa, Artificial Sequence
  Synthetic
ERKLRELEKRIRKAEEELRRDNERSKKETEDVERDLERKNEESERRTREAEKRLKERSD

SEQ ID NO: 17373 - protein, 59 aa, Artificial Sequence
  Synthetic
SEVEEVLKRLRDIARELEKLIEEVIRRDRKLVEELKRRSERSIETDRRLVKRLKEMLDG

SEQ ID NO: 17374 - protein, 59 aa, Artificial Sequence
  Synthetic
EEKVRRAEEEIREVERRLRKLLRDSKEETKEVVKELRRLNEESKKETEKVVREAEKRTK

SEQ ID NO: 17375 - protein, 59 aa, Artificial Sequence
  Synthetic
KDAEEVVRRLTKLVEDLKRKIEEVIREDKELVDRVRDTSRKSDETLEKLVREVKKLLRE

SEQ ID NO: 17376 - protein, 59 aa, Artificial Sequence
  Synthetic
EEKLKRLEDRVREAEKELRELLERSEDTTRRAERELEELNRRLEDKIRRVVEELKEESR

SEQ ID NO: 17377 - protein, 59 aa, Artificial Sequence
  Synthetic
SEVEDVLRRLERLVRELEKETKRSLEENEKLARRLKKKLEDVVRDNKRLVDEVKELLKE

SEQ ID NO: 17378 - protein, 59 aa, Artificial Sequence
  Synthetic
EEKLRRLEKLVRDAARRLKELNDRLRKRSKEVKEELERILRELKERSDRAKEDLRRAAK

SEQ ID NO: 17379 - protein, 60 aa, Artificial Sequence
  Synthetic
SELEKVEKDLEKLIRDDEEENKRVLEELERLVREDKEKNKRVHDETRKLEDTLRRILEKS

SEQ ID NO: 17380 - protein, 62 aa, Artificial Sequence
  Synthetic
EEAKEKLRRLKERIREAEEKSRKSLRDIEETLKKVKRESEETDRRNRDTLRRAKKRLKDETR

SEQ ID NO: 17381 - protein, 60 aa, Artificial Sequence
  Synthetic
DEVEEVKKTIRDLLRRNKEISRETLERLKKLVDENRERNKKVHDETKKLTEEIKKILEEI

SEQ ID NO: 17382 - protein, 62 aa, Artificial Sequence
  Synthetic
EEAEKELRKLEKEVKDAKEESERSDRRLEKEIRDVERDSERSDRENRDEIRRVAEELDERSR

SEQ ID NO: 17383 - protein, 60 aa, Artificial Sequence
  Synthetic
SEAEKVLRDLEELVRENEEKSERSLRELEKLVRDNEEKNKEVVKRIKDLAERIRRILEEI

SEQ ID NO: 17384 - protein, 62 aa, Artificial Sequence
  Synthetic
EDAKRKLEEIRKTLEEVKRRSEDSNRELRRRLEEVKRRSEKSLRDLEELVRRIKKELDDRSR

SEQ ID NO: 17385 - protein, 60 aa, Artificial Sequence
  Synthetic
SEADKLREDLERRVREIEKRSRDSDKRLEELLEEIRRRSKRTLDELERRLREVEEELERE

SEQ ID NO: 17386 - protein, 59 aa, Artificial Sequence
  Synthetic
KKKVDRVRDEVRKVKRKLEEEHKKLERKVREARKELEKSHRDLNREVKKAKERLDRKRD

SEQ ID NO: 17387 - protein, 60 aa, Artificial Sequence
  Synthetic
DEVEKLRKELEDLAEKIKRESEKTLRELKKLADEIRKLSEDTLRRLKELLDRVEELLRET

SEQ ID NO: 17388 - protein, 59 aa, Artificial Sequence
  Synthetic
ERKVRELEKTVEKIKRELEKSHEDLNREVEKIKRDLERSHKELNELVKRAEERLRRETK

SEQ ID NO: 17389 - protein, 60 aa, Artificial Sequence
  Synthetic
SRVEELKRRLEELIERIDRESKRTLKELKDLAREIKELSERTLRELERLAKEVKEELDRI

SEQ ID NO: 17390 - protein, 59 aa, Artificial Sequence
  Synthetic
EEKVKELEERVRRVDEELERSNERLRREVKKIKEELKESHERLNKRVEEIRRELRERSR

SEQ ID NO: 17391 - protein, 60 aa, Artificial Sequence
  Synthetic
DEAERLEEEIRRLAEEIKRLSKESLERVEKLLEEVRRESKRTLEDLERLVRDVEDKLRKI

SEQ ID NO: 17392 - protein, 59 aa, Artificial Sequence
  Synthetic
EEKVRRLKKRIDEIKEELKKSNEDLHRRIEEAKRELEELHERLNRDVERVKEKLRRDAK

SEQ ID NO: 17393 - protein, 60 aa, Artificial Sequence
  Synthetic
RELEELLKTLEELLKKIEEESRRSLEELKRLVDDIRRKSEESLERLERLAERVKEVLDRE

SEQ ID NO: 17394 - protein, 59 aa, Artificial Sequence
  Synthetic
KEKIDRLEKRVRDAKKRLEDLHRELNKRVEDVKRDLEESNKRLHDTVREIKKELRERTR

SEQ ID NO: 17395 - protein, 60 aa, Artificial Sequence
  Synthetic
DEVRELEERIDRILKKIEDESRRTLEEIKKIAREVEKRSEDTLRELDDLVRRVEELLERI

SEQ ID NO: 17396 - protein, 59 aa, Artificial Sequence
  Synthetic
EKDVRRLEKKIREAEKRLRESNERLEKTIRDIKKRLEKLNKELKDRVDEVVKRLRDKTE

SEQ ID NO: 17397 - protein, 60 aa, Artificial Sequence
  Synthetic
SELEELLERLKRRADEIRKESEKTLEELDRDARRIEKESRETLEELKKRLDDVRRALEET

SEQ ID NO: 17398 - protein, 59 aa, Artificial Sequence
  Synthetic
KKKIDDLRRKVEEIEKDLKRSNDELRKRVKEIKDRLKELHDKLNEDVKRARKELEERRK

SEQ ID NO: 17399 - protein, 60 aa, Artificial Sequence
  Synthetic
SEAEELLERLDRRLRRVEETSKRTLDELKRLLEDIERKSRKSLKELEDLVRKVKDMLRRE

SEQ ID NO: 17400 - protein, 59 aa, Artificial Sequence
  Synthetic
EKKIRDLERRVEEAARRLEKSNRDLAEEVERAERRLDRSNRELRRRVEKVLKELEDTER

SEQ ID NO: 17401 - protein, 60 aa, Artificial Sequence
  Synthetic
SELEELEKRLEDLAREIKRRSRESLKELEELVKRIEETSKRTLDELKRLLDEVVKELRRI

SEQ ID NO: 17402 - protein, 59 aa, Artificial Sequence
  Synthetic
EEDIRRLEERVEKIREDLERLNRELHETVKRVKKRLEDSNRRLKEEVRKAKRRLDEELK

SEQ ID NO: 17403 - protein, 60 aa, Artificial Sequence
  Synthetic
SEAEELTERIRKILKEIRELSEKSLRELRELVKTITELSKESVERLKRRVEEVKEELRRI

SEQ ID NO: 17404 - protein, 59 aa, Artificial Sequence
  Synthetic
ESKVRELEERIRRAEEELKKRNEDLHREVRKVLKELRDSNKELEKEVKRVKKELRDESR

SEQ ID NO: 17405 - protein, 60 aa, Artificial Sequence
  Synthetic
SELEKLAEDLERLAEEIKRESDRSLEELRELAERIKRESRKTLEDVKKLLKEVKEVLDRE

SEQ ID NO: 17406 - protein, 59 aa, Artificial Sequence
  Synthetic
DKKIEDLRRRVEEIIKRLEKSNRDLRKEVEDIKRELEKLNKELHDTIREAKERLDRTTK

SEQ ID NO: 17407 - protein, 60 aa, Artificial Sequence
  Synthetic
REVEELLKELEKVVRENEKKIEDLHKRNEDVVRKIEKDHRDSEKELKEVADRVRELLERK

SEQ ID NO: 17408 - protein, 59 aa, Artificial Sequence
  Synthetic
EDDVRRLKKRAEESLKKIEDDLRRDEDRLRRVIEKSKRLVDKLREELERVLREIEKRIR

SEQ ID NO: 17409 - protein, 60 aa, Artificial Sequence
  Synthetic
SEAEKLKEDLDRVVEKVKEDLKRLHDENRRVAEKNERVIEELHRRNREVTKELEKRLEEK

SEQ ID NO: 17410 - protein, 59 aa, Artificial Sequence
  Synthetic
EEKVKRLRDAVRKVLKEIEEELERDERAVAKTLRKIEELLKRDKKELDKVRKRLEERLR

SEQ ID NO: 17411 - protein, 60 aa, Artificial Sequence
  Synthetic
SEAEKIEEELRRAAETAKKRHEDSERELEEAAKTAEERAKRIHDRNERAAEEAKKRAEDD

SEQ ID NO: 17412 - protein, 59 aa, Artificial Sequence
  Synthetic
EEKATRIKREADEARKESKKLAEKLKKRADEARRKLEEEAKRDKERADRAAKEIEDRAR

SEQ ID NO: 17413 - protein, 60 aa, Artificial Sequence
  Synthetic
SEVEKLKEDLKRVVERVKRDHERSLKRLEDVAREVEKRIRDLHERSKDVMRRLKDLIDKK

SEQ ID NO: 17414 - protein, 59 aa, Artificial Sequence
  Synthetic
EDELRKLAEDIKRAEDESRKLVERLKKKAEEVRRKIKKLLEENEEELKRILDRLREAAK

SEQ ID NO: 17415 - protein, 60 aa, Artificial Sequence
  Synthetic
SEVEELLERLKKVADDIRREIEKLHKRTKEVADEVRKRHEDSRRELEKVADEVRDRIEKD

SEQ ID NO: 17416 - protein, 59 aa, Artificial Sequence
  Synthetic
SKALKRLSDEIKKIEDEIRKLLEDNRREVEEAEKESRKLVEELERRAKEVEEEIKRARD

SEQ ID NO: 17417 - protein, 60 aa, Artificial Sequence
  Synthetic
SEVEKILEDLKRVVDEVRKRHKESLDRNKKVADEVRELHERSDKELEDVVREVKDKLEKN

SEQ ID NO: 17418 - protein, 59 aa, Artificial Sequence
  Synthetic
SKDVKRIEDELRKANEESRRLVEELRKHSEDVNRESRKLVEDLERKLRKAEKDIEDDAR

SEQ ID NO: 17419 - protein, 60 aa, Artificial Sequence
  Synthetic
SEVEDLLRRLKEVVEEVERLIKKLHKETKEVVDEVRRLHEKSLRELKKAADDARDALRRN

SEQ ID NO: 17420 - protein, 59 aa, Artificial Sequence
  Synthetic
EEKVRRLAEEVKRALDRIKELIKRNRDELKRANEESKRLVERLREEAERILRDLRRKLD

SEQ ID NO: 17421 - protein, 60 aa, Artificial Sequence
  Synthetic
SEVEKIKKDLEKVADEVRRLHKESLDRLKKVVREVEERLKRLHEESEKVAKDVRRKVEEK

SEQ ID NO: 17422 - protein, 59 aa, Artificial Sequence
  Synthetic
EREVKKIKDDLDRVNEESRRLVEKLERDVTRVRKKIKEELKKNADRLKEVEEDIKRRAK

SEQ ID NO: 17423 - protein, 60 aa, Artificial Sequence
  Synthetic
SEVEELERELKEVVDRVRKLHRESLERNREVVRKVDEDIKKLHRESEEVAKEVEKLIEEV

SEQ ID NO: 17424 - protein, 59 aa, Artificial Sequence
  Synthetic
ERDLKRLEDEARKANKESRDLVREIERHSREAMKRIEEELRRNKERLERVLKKIEDKAR

SEQ ID NO: 17425 - protein, 60 aa, Artificial Sequence
  Synthetic
SEVEKLLEDLKRVAREVEKLLEDLHRRTDEVMKRNEDDIRRLHEESDRVVKRVKDEIEKK

SEQ ID NO: 17426 - protein, 59 aa, Artificial Sequence
  Synthetic
ERDLKRLKDEAKRIEDKIRELLERNREKARRTKEKIKKLVERNRRELEKVLDEIRRRIK

SEQ ID NO: 17427 - protein, 56 aa, Artificial Sequence
  Synthetic
KEVEDVEKRNREVHRRIEKLIEENERRLKEVRDRIRKLVREIEDLNRRVREEVDRR

SEQ ID NO: 17428 - protein, 59 aa, Artificial Sequence
  Synthetic
EEVLRDLLRRNEEVVKRVEDNLRRDTERLEKVAKDVEKKLREVLKRNKEMVDEVRKKTK

SEQ ID NO: 17429 - protein, 60 aa, Artificial Sequence
  Synthetic
SEEEDVLRKLEKIVTDLRETLKRMHEDSERIVEESRKHARKVHEDSKKIVRELKKVLDEK

SEQ ID NO: 17430 - protein, 55 aa, Artificial Sequence
  Synthetic
EEVRRRVEEIRREIERELKRNRERLEEVERENRKLLRENKEELDKVEKDLRDTAE

SEQ ID NO: 17431 - protein, 57 aa, Artificial Sequence
  Synthetic
DDIKRLEDEVRKAAEENKDEVRKNREELKRIKDEIDKLVKDVEETIRRAEDEIRKRV

SEQ ID NO: 17432 - protein, 59 aa, Artificial Sequence
  Synthetic
KRVMEKVLRELKEIVDRSRDHLRRVHEDSKRIADELRRKIEELLKRIKKVVDELREAIR

SEQ ID NO: 17433 - protein, 58 aa, Artificial Sequence
  Synthetic
DDLRRIEKELKRLADRARKINRESDERIKKLEEEIRRINEDSLRRDRDLARRLREMLK

SEQ ID NO: 17434 - protein, 58 aa, Artificial Sequence
  Synthetic
REVKKLKEDLDRVKRELEKLNEEIRDRIRRVKEELKRLNDRSKKHTKEVEEEVERRKK

SEQ ID NO: 17435 - protein, 60 aa, Artificial Sequence
  Synthetic
SEAEDILRRIKRLADENRRILKEILDRIKELADRVRKINEDSLRTLRKLAEELRRVAEKV

SEQ ID NO: 17436 - protein, 58 aa, Artificial Sequence
  Synthetic
EKAERLEREVRKIEKESREMLKRIEDEIRKVEEDLRRLNEELERDVRRVEEEVKRAAD

SEQ ID NO: 17437 - protein, 58 aa, Artificial Sequence
  Synthetic
DELDDIRRRLEKLEEEAERINRESEKRDRELARRIREINKRSKEEDRRLAKEVDEILR

SEQ ID NO: 17438 - protein, 58 aa, Artificial Sequence
  Synthetic
EAVEELRKKIEEVEKKLRRLNEKSKKHTKDVRDELRRLNEDSKRHTDEVKDRLEEATR

SEQ ID NO: 17439 - protein, 60 aa, Artificial Sequence
  Synthetic
DELRKIREDLKRLATEAREINKRSDEDIKRLTDDVRRINKESLERLKKLADDLRDALRKV

SEQ ID NO: 17440 - protein, 58 aa, Artificial Sequence
  Synthetic
EAVKELEEEIRKVKEELKKLNKEIEDKIRDVERELRETNKRLEDEVRRVEEEVRRATK

SEQ ID NO: 17441 - protein, 60 aa, Artificial Sequence
  Synthetic
DDAERILDEIRRLTEELREINKESLKKVERLAERIREINKDSLRRDKELADRLRRMLEEV

SEQ ID NO: 17442 - protein, 58 aa, Artificial Sequence
  Synthetic
EKVERIERTIRKVARELEKLNEDIRKRVDEVEEELKKLNKESEDHTRRVREEVRRRTQ

SEQ ID NO: 17443 - protein, 59 aa, Artificial Sequence
  Synthetic
SELETVEERLKRLEEEIRRLLEKVDRDLDRLADEVRKKNKRSHERNKEIEDRIDKLLKD

SEQ ID NO: 17444 - protein, 62 aa, Artificial Sequence
  Synthetic
EELKKMLRKLEERVKEVTRELEDLLKKAEEKVRRVKDELRRSNKKDEDRLREVEEKLREDSR

SEQ ID NO: 17445 - protein, 59 aa, Artificial Sequence
  Synthetic
SELEEVRKRAKDIADEDRELNRRVHEENKRLADDVRRKNEKSHRDNERIATELRELLRD

SEQ ID NO: 17446 - protein, 62 aa, Artificial Sequence
  Synthetic
EELKKLLDELRKRVEDVKEESKRSLDRDRRELERVKKELDDSNDEDRKRIEEVIKEVRDRSK

SEQ ID NO: 17447 - protein, 60 aa, Artificial Sequence
  Synthetic
DEEREVKERLKELIERLRRLHEESLRELKRIADELRRLHEESHKRNEDIARELERLLAEV

SEQ ID NO: 17448 - protein, 55 aa, Artificial Sequence
  Synthetic
DELERRVRKVEEESKKLHEEIRKRIEEIERESRKLHEDDRRRIEEVLKRIKDAVR

SEQ ID NO: 17449 - protein, 58 aa, Artificial Sequence
  Synthetic
SDEDRLREEAKKVADELRKLHEESHKRNKEIADELRKLHKKSHDDNKRIADEITELLK

SEQ ID NO: 17450 - protein, 55 aa, Artificial Sequence
  Synthetic
EELRDRLRRVEEESRELHKRDREEVERIRRESEKLHREDREDVKRIEKKLRDDAR

SEQ ID NO: 17451 - protein, 60 aa, Artificial Sequence
  Synthetic
DEAEKVLEELRRRAEKVLREVKKVLEDHKRLADELRKELKRVSDENRDSLRRLLEEIDRN

SEQ ID NO: 17452 - protein, 59 aa, Artificial Sequence
  Synthetic
EDLLRRLRELLDEIRKELRDLIRKLRELNDRVERDLRRIIRENRELVRRAEKELEDRTR

SEQ ID NO: 17453 - protein, 60 aa, Artificial Sequence
  Synthetic
DEAEEVLERIKDLARKNEEKNRRVLEEHEKLIRESEERDEKSSRDNKRSVDEIRDIIRRK

SEQ ID NO: 17454 - protein, 59 aa, Artificial Sequence
  Synthetic
EEKIKRIRDELARWAEKIKKTIDELRKLNKEAHDRNRKTIKENEDLVREAKEDLERKTT

SEQ ID NO: 17455 - protein, 60 aa, Artificial Sequence
  Synthetic
SEAEEVLKEIKKLADELRKKNRESVEKVRESSKRLKDEIRKVLEDIKRLAEKLREILREM

SEQ ID NO: 17456 - protein, 59 aa, Artificial Sequence
  Synthetic
EKLLRELEKLIRDIKRELDRSDEKLEELVRRSAKELDDLLDTLREIIERIKRDLDEKLR

SEQ ID NO: 17457 - protein, 60 aa, Artificial Sequence
  Synthetic
REAEEVLKRIKELADEIRKRNRESLERIRKSSEDLKRENEDSIRRVRELIDTLRRRLEKE

SEQ ID NO: 17458 - protein, 59 aa, Artificial Sequence
  Synthetic
KELVDRIRDLIRRIKDELKESDDRIKELIDKSKEDLDKSDEDLKREIDKAREELAKAIK

SEQ ID NO: 17459 - protein, 59 aa, Artificial Sequence
  Synthetic
DEVEELLKEVEELAREIVERLEKNLRDTKKLIDEIEEYARRNEERTRKLIEEAERLARR

SEQ ID NO: 17460 - protein, 59 aa, Artificial Sequence
  Synthetic
EELERRLRRLLEELERRLKRLEDEHRRLVEEVRDKLRKIEETHREIVERVRRTLDEEKR

SEQ ID NO: 17461 - protein, 59 aa, Artificial Sequence
  Synthetic
DDARRLLEEVKELLERSKRHLTKNLEDTRRLIKELLDYARRNLEDTRRLIEEVLDLLKR

SEQ ID NO: 17462 - protein, 59 aa, Artificial Sequence
  Synthetic
EEVKETLKRLLDEIRRENEKVARDHKKLVDDVERELEDIERRHKELVDRARKVAEDEKK

SEQ ID NO: 17463 - protein, 59 aa, Artificial Sequence
  Synthetic
SDAERILDEVRKLVEDSKRHLDENLKRTAELSKRSKEYAEENLDRTRRLAKEAADIARR

SEQ ID NO: 17464 - protein, 59 aa, Artificial Sequence
  Synthetic
EKVKEDLKRLLDEIRKENKRAEDAHRDLARRSREELEKAERKHKELVDRIRKALEEIKK

SEQ ID NO: 17465 - protein, 59 aa, Artificial Sequence
  Synthetic
DEVRKLLKDVRELAREIERRLEENLRRSEELLKRIEDYLRKNLEDTRRLIEEVKELADR

SEQ ID NO: 17466 - protein, 59 aa, Artificial Sequence
  Synthetic
EEFKDRLRRLMKRIKERLEDVKRRHKELVKKARKSLEEVKRRHRKLVEDVRRTLEEEKR

SEQ ID NO: 17467 - protein, 59 aa, Artificial Sequence
  Synthetic
DEARKILEDLKRLAEESIRHLEENLRRSEKLVEDVERYAEENLERTKKLVRDVDEIIRR

SEQ ID NO: 17468 - protein, 59 aa, Artificial Sequence
  Synthetic
EEVKKRLEDLAREIRKANEDVKRRHKKLVDDVRKRLKEIEKKHRDLVRKIEEKLRDARK

SEQ ID NO: 17469 - protein, 59 aa, Artificial Sequence
  Synthetic
SEAEELLKTVRDLVEKSRKHLKENLKRSEELSRKSKEYADKNLERTKRLVKTVADILDR

SEQ ID NO: 17470 - protein, 59 aa, Artificial Sequence
  Synthetic
KKLEDELRRLVEEAKRENDEVRREHKRLVEDSERKLEKIERDHRELVDRVEKEMREKKR

SEQ ID NO: 17471 - protein, 59 aa, Artificial Sequence
  Synthetic
SDVERILEDLDRVVKESKRHLEENLRRSEKLTREVEEELKRNLKESEELVKRVEDIARN

SEQ ID NO: 17472 - protein, 59 aa, Artificial Sequence
  Synthetic
EDAKRRLRELVEKVKEDNKKVKEEHDDLVRKVERRLEEIRKRHEELVRRIRRRLEEEKR

SEQ ID NO: 17473 - protein, 59 aa, Artificial Sequence
  Synthetic
SDVEELLRRLEELLKESEKHLTENLRRSEKLVRDSKRHLDENLKRSKDLAREVVRLAEK

SEQ ID NO: 17474 - protein, 59 aa, Artificial Sequence
  Synthetic
RKVKERARELVERIKRRNEKVERDHEELAREVRERNKEVEKRHRDLVEELRRRLDERKR

SEQ ID NO: 17475 - protein, 59 aa, Artificial Sequence
  Synthetic
SEAEELLERVKKLTDESLRYLEENLDRLRKLVKESEDHLKDNLRKSEKRVREVIDLARR

SEQ ID NO: 17476 - protein, 59 aa, Artificial Sequence
  Synthetic
KDMEDKLRRLVEESRRALEEVLKRHEDLVEEVRKSNDKVRKEHEELVKRVRDALREIKR

SEQ ID NO: 17477 - protein, 55 aa, Artificial Sequence
  Synthetic
SVEERLEKLLKEAEERLRESEDRTRKLVEEVRRELEKLKKRSKELADRVREELRK

SEQ ID NO: 17478 - protein, 59 aa, Artificial Sequence
  Synthetic
EEELEKILDTLRRIAEKLVRKNEDILRRLKEIVKKVIRENEEILRRLEEIAKELAKRLE

SEQ ID NO: 17479 - protein, 55 aa, Artificial Sequence
  Synthetic
SLDEEAKRVVEEVRKRLRESKERSREIVERARRELERLKEESKRLADRIREEVKK

SEQ ID NO: 17480 - protein, 59 aa, Artificial Sequence
  Synthetic
TELVKRLLDDLRRIIRELEEKNRALNETLRKIVEEAIKKNREILEELREEVDRVRKRLK

SEQ ID NO: 17481 - protein, 60 aa, Artificial Sequence
  Synthetic
SEVEKVLREAREILKKNKRENEEVHKKSKEIAERNREKNEKVHRDSRKIIEELKELADRG

SEQ ID NO: 17482 - protein, 56 aa, Artificial Sequence
  Synthetic
EDEARKLVKEVRETLEDSARRDEKLIEDLKRTLDESKKEDDKLIEELERRLREAER

SEQ ID NO: 17483 - protein, 60 aa, Artificial Sequence
  Synthetic
SEVEKVLREAEEIAKKNEEDNRRVNDRSEKIIEENERRNRKVHKESEDIVRDLERLAAEG

SEQ ID NO: 17484 - protein, 56 aa, Artificial Sequence
  Synthetic
EEEVRKLVEKLERLLEKSKRDDEESIKKARELLRRSEEADKKLIREAEEAIRTRKK

SEQ ID NO: 17485 - protein, 60 aa, Artificial Sequence
  Synthetic
SRLEELLKKAKKLVEDVEDTNRKMLEKLRKLADDLRRINKRVLDELERLARELEDIARKI

SEQ ID NO: 17486 - protein, 59 aa, Artificial Sequence
  Synthetic
EEVLRELKKLLDEAKKKLEEIDKRLEDELRKIEDDLRRSNERVRRLLEEVRRRIKEETD

SEQ ID NO: 17487 - protein, 60 aa, Artificial Sequence
  Synthetic
DELEEMLKRLEKLARDLDRINKEVLRRVEEEVRKLEEENEEVLRTLRRLAEEVERILDEI

SEQ ID NO: 17488 - protein, 59 aa, Artificial Sequence
  Synthetic
KEVLDKLEKLLEDIARELEKSNRRLEELLKEVERRLREMDERLRKELEEVKRRLEEKRR

SEQ ID NO: 17489 - protein, 60 aa, Artificial Sequence
  Synthetic
SRVEKVLEELKELMKELDDSNRRVLEELERLVRENTRRNEEVLRRVRELAERLKDELDKI

SEQ ID NO: 17490 - protein, 59 aa, Artificial Sequence
  Synthetic
EELLRRAKELLKRIKERLEESDRRLKRLLDEARKRSEDIIRALEKLLRDVKRELEEKLR

SEQ ID NO: 17491 - protein, 60 aa, Artificial Sequence
  Synthetic
KDAERLFEDLRRLVDENREKNEKVLREIEERVERLERENEKVLRDLEDLIRRVREEIDRT

SEQ ID NO: 17492 - protein, 59 aa, Artificial Sequence
  Synthetic
EEMLRELKKLLDRAREESRRIIEELERTLEKVKERLDRTDKEIEELLKRAEEELREKER

SEQ ID NO: 17493 - protein, 60 aa, Artificial Sequence
  Synthetic
DDLERLLKEVKERIDEVKRRNEEVLKRLRELVKRNKEKNDRVLREAEKLMKKLRDIVRKI

SEQ ID NO: 17494 - protein, 59 aa, Artificial Sequence
  Synthetic
EEVLRRLRELLRTAERELEESNRRAEELLKDARRKSEEIIRRLERLLEEVDRDIKRALK

SEQ ID NO: 17495 - protein, 60 aa, Artificial Sequence
  Synthetic
DDVRELLRTLRKISEDTLRRVEEINRKLERLSRETLKRVEDINRKVKELMEEVLKELDRI

SEQ ID NO: 17496 - protein, 59 aa, Artificial Sequence
  Synthetic
EDALRELKRLVDDNETKLRRLRDTHRELLERNRTELEKLKRTHKKLVDEAEEELRKKDK

SEQ ID NO: 17497 - protein, 60 aa, Artificial Sequence
  Synthetic
SDVERLLEKLRDLSRRTVRELERINEEVREIIKTLKKELDRTNKELRDIIEEIKKELDKI

SEQ ID NO: 17498 - protein, 59 aa, Artificial Sequence
  Synthetic
EKLLDELRRLLEENEKTLEDVRRTHEELVKRAKRELEKNIEEHERLVRDVKEKLERKIR

SEQ ID NO: 17499 - protein, 60 aa, Artificial Sequence
  Synthetic
SDAEELLKEAREVSKRTKDTLDEINKDVKRISEETKKRLKKTNEEIKEIADRLRKELERI

SEQ ID NO: 17500 - protein, 59 aa, Artificial Sequence
  Synthetic
EDILRELKKLVDDNRKTLKEVLETHEELLRDNSRKLERNVERHAKLVRDIKEELKETTR

SEQ ID NO: 17501 - protein, 60 aa, Artificial Sequence
  Synthetic
SDAERLLKEVEEIARRLEKKMRETNKEVDRIVKEIEDDARRLNKELREIAERIKDELDKI

SEQ ID NO: 17502 - protein, 59 aa, Artificial Sequence
  Synthetic
EKVLKELKRRLEEIKKKLDDNLRRHKKKVDDVARELEKIVKTHRDLVEEIRRRLRKKEE

SEQ ID NO: 17503 - protein, 59 aa, Artificial Sequence
  Synthetic
SDAERLLEELKRISEETKRRLAETNKKVKKIMKELTETLTETNKKLKKIIDDLRDRIDK

SEQ ID NO: 17504 - protein, 59 aa, Artificial Sequence
  Synthetic
ERVLKELRRLLERNREELRRNKEKHKELVERIKRRLEENKERHKRLVDEARKELKEKEK

SEQ ID NO: 17505 - protein, 60 aa, Artificial Sequence
  Synthetic
KDAEELLKTLERLSRETKRRLERTNRELKEISKETEKDLERTNRKLKEIIDRLREELDKI

SEQ ID NO: 17506 - protein, 59 aa, Artificial Sequence
  Synthetic
EEMLRELRRLVEENKKRLRENIRRHERLLEENRRKLEKNIRDHERRLEKADKDLEDKRR

SEQ ID NO: 17507 - protein, 60 aa, Artificial Sequence
  Synthetic
KDAERLLEEARRIVKEADDILRELDEEVRRIVEKIKRDAERTNEEIREIAKRIRDEIERI

SEQ ID NO: 17508 - protein, 59 aa, Artificial Sequence
  Synthetic
EDVLRELRKLVEDVKRRLKEVADHHRELVRRAEEELKKNRDEHERLVREIEKELRKARE

SEQ ID NO: 17509 - protein, 60 aa, Artificial Sequence
  Synthetic
DEAERLLERVKELMERLTEEARRTNETLREIVERAERRLRELDERVRKIAEEIRRRLEKI

SEQ ID NO: 17510 - protein, 59 aa, Artificial Sequence
  Synthetic
EKVLTKLRKLLEDIRRRLEKNLKDHEELVRRVEEKLKRVREHHEELVRRIKEELDKAEK

SEQ ID NO: 17511 - protein, 63 aa, Artificial Sequence
  Synthetic
RDAEELLRTMEEITRRVKKELEDLLRTDEELSERVKEEARKLDEKLKELARDVTEKARDIKKG

SEQ ID NO: 17512 - protein, 59 aa, Artificial Sequence
  Synthetic
DEVKKELKRLIEEVRDRLKKVKDTLEKLIKENEDELRKVEEHHEKLLREIEETLERMRK

SEQ ID NO: 17513 - protein, 63 aa, Artificial Sequence
  Synthetic
EEAERLLKKAEDLSRDTARKAKELLEEDEKLVRDAEKKARELDRELEKLAEEAARAATRAKKD

SEQ ID NO: 17514 - protein, 59 aa, Artificial Sequence
  Synthetic
EEARKRAEDLIRESEKRARDAKRRAKELIDRSRKSAKEAKEHHEKLIKEARDELEKAKK

SEQ ID NO: 17515 - protein, 60 aa, Artificial Sequence
  Synthetic
DEAEKLLRELEKLSRETEKRVREIIKKDRDLSEEVRRRAERLDDELRKLVEDAERELRRI

SEQ ID NO: 17516 - protein, 59 aa, Artificial Sequence
  Synthetic
DKVRKRLEELIRESDERLKELTKELRKLIEDNRRELEKIIRHHKRRVDEVRKRMTELRR

SEQ ID NO: 17517 - protein, 61 aa, Artificial Sequence
  Synthetic
SEVEDLLRRLEEIVKRNDDELRADEERTRKIIKENKETLDRLLEDLKRILRELEKIVRDKG

SEQ ID NO: 17518 - protein, 59 aa, Artificial Sequence
  Synthetic
EEAKRRAEEKLKRLEERSREIERRLKKLNEELKRISDEVEKTAREILERIKRRIEEEER

SEQ ID NO: 17519 - protein, 61 aa, Artificial Sequence
  Synthetic
SRVEKLLDDVRKILEDNERRLRDDMRRTEEIIRKNKRDLERLKERHEEIVKRLDEIIKKEG

SEQ ID NO: 17520 - protein, 59 aa, Artificial Sequence
  Synthetic
EDARREAERLLKEVEDTSREAEKRLRELNEELERRSRKVEEELKKSDEELKRRIEEAER

SEQ ID NO: 17521 - protein, 60 aa, Artificial Sequence
  Synthetic
SIEDRLRKIVRDLEKVLRDLKREHDDVVRELEKRLRDIEERHRELVEELKKRIEEIERER

SEQ ID NO: 17522 - protein, 59 aa, Artificial Sequence
  Synthetic
EKDLEELLKELEDIIREVRKRAKENLDRTRKLIKDIEDYLKKNLDRVRKLIEDITRALK

SEQ ID NO: 17523 - protein, 60 aa, Artificial Sequence
  Synthetic
SIEERLREVERRLREDLKRLEKAHRDIVRDIERTLRKVEEDHRRVKEKLKRTIEDVERRR

SEQ ID NO: 17524 - protein, 59 aa, Artificial Sequence
  Synthetic
EKELEKLLRDLKRIIDEVRKYATRNLEELKRVLKRVKEEAEKNLERTERLIEEIRRRAE

SEQ ID NO: 17525 - protein, 60 aa, Artificial Sequence
  Synthetic
SIEETLREIVKDLERVLEEIERRHREIKKELEDILRELKKRHEDVVREAEKELRDAKRRR

SEQ ID NO: 17526 - protein, 59 aa, Artificial Sequence
  Synthetic
REELKRLLDELKKLIDRVREEAKKNLDRSKKMIEDVERYARENLRRTKELIDDVKEKLR

SEQ ID NO: 17527 - protein, 60 aa, Artificial Sequence
  Synthetic
KIEEEVDKVRRTLEKELKEIDERHKRIVEKLREELKEAEKRHEELVKRAKEELDDVKRRE

SEQ ID NO: 17528 - protein, 59 aa, Artificial Sequence
  Synthetic
EDLLRKLLEELDRIRKEVRERLKRNLDRLKKLIDEVREYLERNLRRTKKLIDRVREDAR

SEQ ID NO: 17529 - protein, 60 aa, Artificial Sequence
  Synthetic
DVEEELRELIERLKEVLDRLREESKRVIKELRDTLRELEERSRDIIRKLEETLRDVARKS

SEQ ID NO: 17530 - protein, 59 aa, Artificial Sequence
  Synthetic
DEFLRRVLERAKKIVRKLEEDARRVLEETEDLIRRLREKAERVHEKTKKIIKEITEELK

SEQ ID NO: 17531 - protein, 60 aa, Artificial Sequence
  Synthetic
SVEDALRKLIEELKRVLKKLEDDSRRIIEELRKVLKDLEDRSRKVIEEIKDDLRKIAEKS

SEQ ID NO: 17532 - protein, 59 aa, Artificial Sequence
  Synthetic
EEVAKRLLDKARDIVRTLKEEAERVHERSRRIIEELRREAEEVLEETRDILRRLREEAK

SEQ ID NO: 17533 - protein, 60 aa, Artificial Sequence
  Synthetic
SELEKVLEKLKDLLRKVREKNERVLREVEERTRRVKRDLERVLKEAKDILRKAKKLADDG

SEQ ID NO: 17534 - protein, 59 aa, Artificial Sequence
  Synthetic
EEIARRIKKVLDDWKRVSEESKRRIEELLKRDKEELEKIKRAAKKVIDELKRLLEEAER

SEQ ID NO: 17535 - protein, 60 aa, Artificial Sequence
  Synthetic
SRAEEILKRLEELIKRLKEENDRVLEENKRLIEELEKKNRDALRRIEELLKELKDIARRI

SEQ ID NO: 17536 - protein, 59 aa, Artificial Sequence
  Synthetic
EDLEEKLRRLLDELRKISEEVEERSERSNKELEDVSEDSKRKLRKILEDLRDLLRRTEK

SEQ ID NO: 17537 - protein, 60 aa, Artificial Sequence
  Synthetic
SRAERILEEMERLIEEVRKENERVLRENRRLIKELKEENERILRELKRLIKEAKEIVERI

SEQ ID NO: 17538 - protein, 59 aa, Artificial Sequence
  Synthetic
EEVDERLERLLKTAEDDSRRSDKRSEDSNRELRKVSEDSRKRLEELLKDAERKLREDEK

SEQ ID NO: 17539 - protein, 60 aa, Artificial Sequence
  Synthetic
DDVDRILEELKRLVEENRKRNEDIERELEKLIKEVEDSNRTMLERMEDLIRELRDIVRRI

SEQ ID NO: 17540 - protein, 59 aa, Artificial Sequence
  Synthetic
EDAERRLKELLEDAKRVSDEVLRRLTELLKKAKDVSDESRERLRRLLEDLERDLKRERT

SEQ ID NO: 17541 - protein, 60 aa, Artificial Sequence
  Synthetic
SDAERLLRELERLVEENRRRNKKVLDDNERLVEKLEKSNRRALEELKELVDRLEDIARRI

SEQ ID NO: 17542 - protein, 59 aa, Artificial Sequence
  Synthetic
ERVREELERLLEEAKRDSDEVRERSKKSNKKLEDVSRKSKKDLRDLLKKARDILKETER

SEQ ID NO: 17543 - protein, 60 aa, Artificial Sequence
  Synthetic
SDAEEVLKELERLIREVEERNKDILRKAKELVRDNERKNREVMERLKKLIEDLKKIAKEI

SEQ ID NO: 17544 - protein, 59 aa, Artificial Sequence
  Synthetic
EEVEKRLKDLLREAEEVSRRSEERLRELLKELEDVSREVKRRLERILEELKRILDEVEK

SEQ ID NO: 17545 - protein, 59 aa, Artificial Sequence
  Synthetic
DEVEELTERLKRVLEDNRRTAEEVKERTRRVIDKVRRDYEELEKRLKKILKEIEDLSRE

SEQ ID NO: 17546 - protein, 56 aa, Artificial Sequence
  Synthetic
EDTVRRLIKEAKDDNDRMEEENRRLIRELEEVSKRAHKRLRELIRRIEELLRREET

SEQ ID NO: 17547 - protein, 59 aa, Artificial Sequence
  Synthetic
SAEEEVRKIKREIEKVLRESEREIERVEKEIRDVLRKSEREIERVKREVDKVLEEVRRA

SEQ ID NO: 17548 - protein, 56 aa, Artificial Sequence
  Synthetic
LEDLLREVKKAIEKNEKDNRDVLREVEEKIRRDEKRNKEVLEDAKRKIEELKKRAD

SEQ ID NO: 17549 - protein, 59 aa, Artificial Sequence
  Synthetic
SAEDAIREVERKAREVLKRSKEEIDKVVKKAEEILKRSKDEVKKVADEIRRILEEVRRA

SEQ ID NO: 17550 - protein, 56 aa, Artificial Sequence
  Synthetic
LEDVLRRIEKIIRDNAEENKRVLEEAEEVLKKDEKDNRDVLEELKKILEELKRKAD

SEQ ID NO: 17551 - protein, 59 aa, Artificial Sequence
  Synthetic
SVEEAVKRLADEIRKVLERSKEELERVAKEAEDVLRRSREELKKVADEVRKVLDDVRRA

SEQ ID NO: 17552 - protein, 56 aa, Artificial Sequence
  Synthetic
LEDALRRLKEIIDENKRENEEVLKRAREIIEENKKRNKEVLDEAKEIIDRVREKAR

SEQ ID NO: 17553 - protein, 59 aa, Artificial Sequence
  Synthetic
SAEDAIRKIAEDAKKLLEDSRRELRRVVEKVKRLLEKSKEDLDRVAEEVKKVLEEADRA

SEQ ID NO: 17554 - protein, 56 aa, Artificial Sequence
  Synthetic
LEDAVREVREVLKKNKEDNDRVLREAEEVLKRNEEENRKVLEEAKRIIDELKKRID

SEQ ID NO: 17555 - protein, 60 aa, Artificial Sequence
  Synthetic
SVREELTRVKKRARDVLERSREEAERVAKRAEEVNRESEREIERVLEEVERILEDIREKV

SEQ ID NO: 17556 - protein, 59 aa, Artificial Sequence
  Synthetic
EEAVRDVLRKVREIIRRNRKENEEVLRDVERLIRELEERNRRVLKKAKEILKRIRDKAE

SEQ ID NO: 17557 - protein, 60 aa, Artificial Sequence
  Synthetic
SVEEELEKVKRKAEKLLEDSDREIKRVTKKAEKVLEDSRKAVEEVEKEVKEVLDEIRANV

SEQ ID NO: 17558 - protein, 59 aa, Artificial Sequence
  Synthetic
EKKAREVLKKVEDRIEENRRRNEEVLEKAEKIIEDNRRKNKTELDKVKEIIRRIREEAR

SEQ ID NO: 17559 - protein, 59 aa, Artificial Sequence
  Synthetic
SAEDALRKLKEDSKRVNDESRREAERLKREIEKINEDSDREVEKVKKKIEELLEKVERD

SEQ ID NO: 17560 - protein, 59 aa, Artificial Sequence
  Synthetic
ERELKRVLEEVERLIEKVKTDNKRVLDEIRKILEEIERKNRKVLKEVEDLLKTMEDEAR

SEQ ID NO: 17561 - protein, 59 aa, Artificial Sequence
  Synthetic
SLEEAVREVERKAKKVNDDSREEVKKVKKESKDVNKKSEDDARRVVEEIKKILKRIAEK

SEQ ID NO: 17562 - protein, 59 aa, Artificial Sequence
  Synthetic
ERLAKKVLDEVEKIIEDIKRRNEEVLRRVREDIKRVEEENKKVLKRVKERVEEMRRRAD

SEQ ID NO: 17563 - protein, 59 aa, Artificial Sequence
  Synthetic
EMEDEARKVIKKIKEVNRRSREESEKLSRKSERVNRESKRASEELREEIRRVLEEIRRK

SEQ ID NO: 17564 - protein, 59 aa, Artificial Sequence
  Synthetic
RRKMKTVLDEVEKEIRRIEEENKKVLKESEDLIREVEKENREVLERTKRIIDEARKRAD

SEQ ID NO: 17565 - protein, 59 aa, Artificial Sequence
  Synthetic
SVDEAVKEVEDRLRKVNEESTRESKKVVDKARDVNRKSEEASRELEDRIEKVLTDIRRK

SEQ ID NO: 17566 - protein, 59 aa, Artificial Sequence
  Synthetic
ERLAKRVLDEAKRILDEVKEKNRRVLEDSERIIKEVEDRNRRVLEETRRIIEELRKEAD

SEQ ID NO: 17567 - protein, 59 aa, Artificial Sequence
  Synthetic
SVEEMVKELIRKLREVNKRSADELDRVRKRMKKLNDDSRKAVKEVREKIERLLDAARRR

SEQ ID NO: 17568 - protein, 59 aa, Artificial Sequence
  Synthetic
ERLAEEVLRRVEKKIEDIRRRNEKVLRELEKILREVSEENERVLRDLERKLRKLAEDDR

SEQ ID NO: 17569 - protein, 59 aa, Artificial Sequence
  Synthetic
SVEDEIRKVKDELRRVNEKSTRDSKRVRDRMETVNRESEKRARDVKKRIKEVLDKIRER

SEQ ID NO: 17570 - protein, 59 aa, Artificial Sequence
  Synthetic
KRLADDVLRKVRDEIRKIEEDNREVLRRSEDILRKIKERNKKVLDDVRRKIDKARRDAE

SEQ ID NO: 17571 - protein, 59 aa, Artificial Sequence
  Synthetic
KAEEAAERIKKKLEDILKRAKEESEKILDKLREVLERSKRKHEELIRRAEEVLKDIARK

SEQ ID NO: 17572 - protein, 55 aa, Artificial Sequence
  Synthetic
RDVLTELEKIIKELEKRAKEVLDTSRKSIEDLERRNEESLKRLTDDLKRAKEEAD

SEQ ID NO: 17573 - protein, 60 aa, Artificial Sequence
  Synthetic
SEVEEVLKRLEELLRDSERKVEEMERRLKEIIDRLREEAKRVLDESKESSKRLDELAKKG

SEQ ID NO: 17574 - protein, 59 aa, Artificial Sequence
  Synthetic
EEADRALRDLERKHEKRVREVDDRLKKIEDELKRVVEEIRKRLEDLKEENRRIVDRTAT

SEQ ID NO: 17575 - protein, 60 aa, Artificial Sequence
  Synthetic
SDVDEVLKRSEDSTRRLRERAERMLEELERLIRESKRTADEVLKRSRESSKRLDEEVRAG

SEQ ID NO: 17576 - protein, 59 aa, Artificial Sequence
  Synthetic
EEVRKELERLRRENEKVVREAKKRLEDIIRKHEKIVKEIKEALDKLLEDNKRIVDRTSK

SEQ ID NO: 17577 - protein, 60 aa, Artificial Sequence
  Synthetic
DELEDVLRKAKELIKRDRDEVRRVLEELKRSTEDLRRKVRDVERRLKELIDELDDIARKI

SEQ ID NO: 17578 - protein, 55 aa, Artificial Sequence
  Synthetic
KELEKIKKELEDVIRETRERLKKVLDETREDIKDVDRRLRKLEEEIRRKVEEDER

SEQ ID NO: 17579 - protein, 60 aa, Artificial Sequence
  Synthetic
SELEEIIERIKRLIEEDRETVKEVLERLRRLSDEDRKEVKRVLREIKELIKELEDLRRRI

SEQ ID NO: 17580 - protein, 55 aa, Artificial Sequence
  Synthetic
EELERLKEEAKRVIKRTRDELEKILRENRELIDRSRKELRDLEKELRDVVRESER

SEQ ID NO: 17581 - protein, 60 aa, Artificial Sequence
  Synthetic
SVREELEKLVRELRRLLEKSKRDTDRLSEEMEELNRRAEELIRTIERRLRELLRKIRENV

SEQ ID NO: 17582 - protein, 59 aa, Artificial Sequence
  Synthetic
EKLVEELKRRAKKVIRELEELSRRATEEVKRVLKENEDLVREVEKDLEEILKRIKDRAD

SEQ ID NO: 17583 - protein, 60 aa, Artificial Sequence
  Synthetic
SLEEELKKLEEEVRRLLEKSKEDTDRLKKEIEDLNKKAEDDVREIRKELEKLLRDIARNV

SEQ ID NO: 17584 - protein, 59 aa, Artificial Sequence
  Synthetic
EELAKRLSDKFRRILEKLEEDSKRALDKAREILKRNEELLRELLEELRRILEEIERRAR

SEQ ID NO: 17585 - protein, 60 aa, Artificial Sequence
  Synthetic
KAKEELDRLRKEARDLLEDSKTKTKRLVEEMDKVNEDSKRESKKLLDELEKLLRDIEKRV

SEQ ID NO: 17586 - protein, 59 aa, Artificial Sequence
  Synthetic
DKLVEKLREEVERILERVKELSKKAIDEVKEVIKRNRDLSKRVIERAKEILRRIEEKAR

SEQ ID NO: 17587 - protein, 60 aa, Artificial Sequence
  Synthetic
SVEDELRRIEEEMKRLNEKVERDSRRVLKEVEDLNREIKKRSDDLEREIRRLLEEVKRRK

SEQ ID NO: 17588 - protein, 56 aa, Artificial Sequence
  Synthetic
IRELLKELRKILDDNRETARKVLEDSKRIIERNKREAEKLERRSRKILKDIEDEAR

SEQ ID NO: 17589 - protein, 60 aa, Artificial Sequence
  Synthetic
SVEEELRRLEKRIEELVREIERRLRELKKEVEELNERIKRASDEILDRIRRLLEEVRRRK

SEQ ID NO: 17590 - protein, 56 aa, Artificial Sequence
  Synthetic
VRDVLREVERIIRELEERARDLLRRIREIIRRNEEKLERLLRRSKEILKEIEERAK

SEQ ID NO: 17591 - protein, 59 aa, Artificial Sequence
  Synthetic
STERKLEELEKEAEKDLKEVEDRLKELNDHHDKRVKEVEDRLRRANKHHRDRLEDIRRR

SEQ ID NO: 17592 - protein, 56 aa, Artificial Sequence
  Synthetic
TDEVLKRLKDLIKELRDEVRKVLTEHREIDKRVEEEVKRVLDEHREIDKRLDEETK

SEQ ID NO: 17593 - protein, 59 aa, Artificial Sequence
  Synthetic
SSKEKIERLREKLEDLVRRVRKRLRELNEHHKELVKRIEDTLRELLRHHDELLKEAERR

SEQ ID NO: 17594 - protein, 56 aa, Artificial Sequence
  Synthetic
TEDVLRRIEELIERLKREVDRVEREHERIDEEVRKRAEDIERRARDIDREVKETTR

SEQ ID NO: 17595 - protein, 59 aa, Artificial Sequence
  Synthetic
SVRETLERMLRHHAELVERVRRELRKLNKHHRDEVKRVEERLDELRKHHEELLRRAEKD

SEQ ID NO: 17596 - protein, 56 aa, Artificial Sequence
  Synthetic
AKKVVEDLRRINERVKDEVRRALREHERIDKEVREIVEEIERRAEKIDEELKRTID

SEQ ID NO: 17597 - protein, 59 aa, Artificial Sequence
  Synthetic
SVEEALTEIKKRLDKKVEDIERELKKLLDHHKELVDDVRRKLEELNRHHDRLLDEIRKD

SEQ ID NO: 17598 - protein, 56 aa, Artificial Sequence
  Synthetic
KDEVLKRLEDLIRELDRRVKEIEKRAEEIDRELEDRVRKVLDEHRKIDERAARETD

SEQ ID NO: 17599 - protein, 59 aa, Artificial Sequence
  Synthetic
ETKERLDEILKHHEEEVKKVRKRLDELLRHHEELVKEVDKRLKEMNDHHRRLLDEADKD

SEQ ID NO: 17600 - protein, 56 aa, Artificial Sequence
  Synthetic
KDDVLRRLEDINRRLEERVRKAERRLEEIDEKAERITEKVKREHEDIDRRVEDIKR

SEQ ID NO: 17601 - protein, 59 aa, Artificial Sequence
  Synthetic
SVKERLDEVRRHHEDEVRRVDEKLKEILRHHEEEVRRVDKELKELLDHHKELLDDAERR

SEQ ID NO: 17602 - protein, 56 aa, Artificial Sequence
  Synthetic
AEEVKKRLDDINKRVEEIVREIEERLRRIDEKLKEIVRKAAEDIRRIDKEVEDEIR

SEQ ID NO: 17603 - protein, 60 aa, Artificial Sequence
  Synthetic
SLEELLKKIEERLRDLSRKVAEELKRILDELRELSERAKDLNRRVNETLRKLVEDITRRD

SEQ ID NO: 17604 - protein, 59 aa, Artificial Sequence
  Synthetic
EEDVKKVLDELEKLLKDNEELNRRVRKELKDLLETLRKLNERSKEELDKLIKELEDRAR

SEQ ID NO: 17605 - protein, 60 aa, Artificial Sequence
  Synthetic
REVEEILRKLKEITDRTRDLSRRNEEELRRIIRELEEMSKRNKREVEEIIKEAKELAKRT

SEQ ID NO: 17606 - protein, 59 aa, Artificial Sequence
  Synthetic
EKAREDLDRLRRENEELIERSERINKKIKEELERVIKRSEDLNKKLEEDLEKLIRDETR

SEQ ID NO: 17607 - protein, 60 aa, Artificial Sequence
  Synthetic
EEVERILTKAERVTRETERLSRENEKELKKITDETRRLSEKNIEDIERIIEEMERLARTT

SEQ ID NO: 17608 - protein, 59 aa, Artificial Sequence
  Synthetic
EDARRELKRLEEENRRLLEESEERNRRIEERNEELIEESERRNRELEKRLRDLIKETRD

SEQ ID NO: 17609 - protein, 60 aa, Artificial Sequence
  Synthetic
SAEDSIRRAEEEARRLIKRAEEEAEKSARRHKELNERARKRAKESAEEAEKLIREAARSG

SEQ ID NO: 17610 - protein, 56 aa, Artificial Sequence
  Synthetic
ARDLEEKAKKALEKAERIARKNAEDNERNLEKSKRIAERNAKKNEEALREIAKKAN

SEQ ID NO: 17611 - protein, 59 aa, Artificial Sequence
  Synthetic
SAREDIERLVKELKELVERAREAIKRSAEEHKKLNKELKDRIKEVVERLKKLIDDARRD

SEQ ID NO: 17612 - protein, 56 aa, Artificial Sequence
  Synthetic
AEELLKKAKRVIEKAEKILRENKEENERNLATSEKIARDIEDKLRKVLKRIADEIR

SEQ ID NO: 17613 - protein, 59 aa, Artificial Sequence
  Synthetic
SAEDKLREVEKHHEKLVRDIRRKLEKNLRDHAEKVDRVRKKLEEAERRLKELVDRVRKD

SEQ ID NO: 17614 - protein, 55 aa, Artificial Sequence
  Synthetic
ERVDRDLERLDREVEEIARRLTRLMEESNKRLEDIVRTIEERIKEILERLKRTAK

SEQ ID NO: 17615 - protein, 60 aa, Artificial Sequence
  Synthetic
SDVEKIIKDLEKVIDDNRRTNEKAIRDAEDIIRRSEEHSRKVIEKLKKIIKEVKEEAERL

SEQ ID NO: 17616 - protein, 56 aa, Artificial Sequence
  Synthetic
EEEVRRVEEEIKKLLEDSRRLLRRIEEESRRLDEEDERLMKEIDDEIRELLERIRR

SEQ ID NO: 17617 - protein, 60 aa, Artificial Sequence
  Synthetic
KEVEDIVDEARKRIDTVRKESKRVVEEVERRIEENKRRNEEVIKRVREDIDRVRKEADKL

SEQ ID NO: 17618 - protein, 56 aa, Artificial Sequence
  Synthetic
REELERLRREVEKLEEDDRRLLEELEKRARELLERSKKLLDEIRREMEELLKRIRT

SEQ ID NO: 17619 - protein, 61 aa, Artificial Sequence
  Synthetic
KEVEDIIREVEKRIRDSERHSKEVLDRAEEVIDDNRRKNEEVIKEAEEIIDRIRREADRLK

SEQ ID NO: 17620 - protein, 56 aa, Artificial Sequence
  Synthetic
KDLLKEVEERSRRVIEKDRELLKRLEDKVRKLVEDSRRMVKRIEEEIRKLLEDIRR

SEQ ID NO: 17621 - protein, 60 aa, Artificial Sequence
  Synthetic
SELEKIIEDIKRLIDELRKLVEDVERRNRKLSEDDKRLVEEVLKRLDELIRRLREIAKKI

SEQ ID NO: 17622 - protein, 55 aa, Artificial Sequence
  Synthetic
ERLDELRERLKRLEDEVRRRLEELERENRKIIEETEEALRRIEEKARKELEEVDR

SEQ ID NO: 17623 - protein, 60 aa, Artificial Sequence
  Synthetic
SELDDIIRKIEELIRDDERKVRKAVRENEDLSRRDEERVRKVIDEARKLLKRLEEIAREI

SEQ ID NO: 17624 - protein, 55 aa, Artificial Sequence
  Synthetic
EKLDELRKRLEDLIRETEKELRRLERENDEIEKRTEDLLRRLREELRRIVEEVER

SEQ ID NO: 17625 - protein, 60 aa, Artificial Sequence
  Synthetic
DDLERIIEEIERLIRTLEELVRDALRKSKRLLEENKKLNEEVLRRIKDLIRRLEEIARRI

SEQ ID NO: 17626 - protein, 55 aa, Artificial Sequence
  Synthetic
EELDKLREELKRLVDRVEEMLRKSEEDTERIIRKSEEDLERLERDLKRLVEEVRR

SEQ ID NO: 17627 - protein, 60 aa, Artificial Sequence
  Synthetic
KELEDIIREAEKLIEENSRKNKEMLDRSKELIERNERKNRDVIRRLEELIEDLRRIAEEI

SEQ ID NO: 17628 - protein, 55 aa, Artificial Sequence
  Synthetic
EELDRLRKKLEDNIRESEKELRRSEEETKKLIDDSERELERIERRARELLERVRR

SEQ ID NO: 17629 - protein, 60 aa, Artificial Sequence
  Synthetic
SDVEDLLRKIKKILREIAEESKRTVRENEELTDRVKKKIREIVERIRRIIKELEERLRRI

SEQ ID NO: 17630 - protein, 59 aa, Artificial Sequence
  Synthetic
KDVEDKLRELERELKKIEDDSRRLLKRLEEENRTLVKEVRERLKRLEDDVRKLKEDVTT

SEQ ID NO: 17631 - protein, 60 aa, Artificial Sequence
  Synthetic
DEVDKLVEEIKKIIEDVRRESDKTVRDNEELTKKLAEDSKRSLDEIKKLIEELRKEIERI

SEQ ID NO: 17632 - protein, 59 aa, Artificial Sequence
  Synthetic
EEVERKLKKLKEELERLVEESRRKLEELKKRNEELVRRSREELDKLRREVKETLERVKR

SEQ ID NO: 17633 - protein, 60 aa, Artificial Sequence
  Synthetic
SDAEEILKEIERLIREVEKTSRRTVEEDERVTEEVRKKSEKSVRDIEELLKEIKRELEEI

SEQ ID NO: 17634 - protein, 59 aa, Artificial Sequence
  Synthetic
ERVERKLEELKRRLEELEKESERELDRLRKENEDLVRRSEEELRRLRRELEEIVREARE

SEQ ID NO: 17635 - protein, 56 aa, Artificial Sequence
  Synthetic
SEAEKVLKEVEDIIREVEEENRRLIREIEEEIRRVKEEVERLLRKSEKDIKEVEES

SEQ ID NO: 17636 - protein, 56 aa, Artificial Sequence
  Synthetic
EKLLREIERRMRELEKTSRKLLKEIKKKAKELKEKAEEVLRRSRKRTEELVDRLRK

SEQ ID NO: 17637 - protein, 60 aa, Artificial Sequence
  Synthetic
DVEDLIRELRKRLDELRKESEELLRRSKRKHEKLLTDSRKLLRDIEREARKLLEDVKRKG

SEQ ID NO: 17638 - protein, 59 aa, Artificial Sequence
  Synthetic
REMIETLIRKAKEIIDRLREENRRAVRRSDETLRRLKEENDKVITDVKRKIKELRDEVK

SEQ ID NO: 17639 - protein, 60 aa, Artificial Sequence
  Synthetic
SIDEEITRLEEESRRDEEESKRLLEKSRDDHRRLLERSEKLLRELEKRARDLLEDVKRKG

SEQ ID NO: 17640 - protein, 59 aa, Artificial Sequence
  Synthetic
EEMVRRVIEKYERAVERSTEENRDAFRRSEETIRELAKENEDAIREVKEIIDKLREDVR

SEQ ID NO: 17641 - protein, 60 aa, Artificial Sequence
  Synthetic
DVEELIKELERRLRKLLEDSRRLLEESRREHKKLIDDSRRLLDELRRRLERLLEKVRRRG

SEQ ID NO: 17642 - protein, 59 aa, Artificial Sequence
  Synthetic
REVIEAVIRKAEDIIRRLRRKNEKAVEESRENIKEIKRENKRVIDEAREIIKRLEEELE

SEQ ID NO: 17643 - protein, 60 aa, Artificial Sequence
  Synthetic
SVEDLLRRLEEESRKDLDDSRRLLDESRKRHEDLLRKSEELLRELEERLRRLLEKVKKKG

SEQ ID NO: 17644 - protein, 59 aa, Artificial Sequence
  Synthetic
EDVIRKLIEDYERLVKESTDRNRRAVEKSRENLKRLDKENRDVIEKARRIIEELEKEVK

SEQ ID NO: 17645 - protein, 59 aa, Artificial Sequence
  Synthetic
SVDELIEELRRRLEKLLREAEELLKESRKRHEELKKRSKELLDELEREVERVLEELRRK

SEQ ID NO: 17646 - protein, 59 aa, Artificial Sequence
  Synthetic
EEVIERVIRKADEIIKRLKKELREVVERSKENIKKLEEENRRVIKKAREELRKIEEEIR

SEQ ID NO: 17647 - protein, 60 aa, Artificial Sequence
  Synthetic
SEVDEVLKTLKELIERLRERVKEVLKRLEKLLKELEDLSRETVRELRETNDDLRRKAEKT

SEQ ID NO: 17648 - protein, 56 aa, Artificial Sequence
  Synthetic
REAAEKVRRDVDRLRKEVEEMLERVKRKLDELRKDSDRLAREVEDSTRKIERDVEK

SEQ ID NO: 17649 - protein, 61 aa, Artificial Sequence
  Synthetic
SELEEMVKKVKEIIDRARERIRELIERHKELDRESRKRIEDIIREARELNKDVKRVIKEIK

SEQ ID NO: 17650 - protein, 56 aa, Artificial Sequence
  Synthetic
DEALEELKRRVKRLEEKLREDIKRLRENNERIREDVERLAEELDRHTRKLMEEVKK

SEQ ID NO: 17651 - protein, 60 aa, Artificial Sequence
  Synthetic
SELEDIVEKAKKIIEDVRRRIEKLIRDDKRLNDESKKTIEELIRKARKLNEEAERIIRKI

SEQ ID NO: 17652 - protein, 56 aa, Artificial Sequence
  Synthetic
RELLEKLRRDVEELEREVRELLERLKENSKRIEDEVRELMKELKRHTEELEREAER

SEQ ID NO: 17653 - protein, 60 aa, Artificial Sequence
  Synthetic
RELEEIVERAKEIIRRVAEKIKKLIEEAERLDRDSKRKIDELIEKVKKLNEDVRRTIEEI

SEQ ID NO: 17654 - protein, 56 aa, Artificial Sequence
  Synthetic
EEMLRRLTELLKELADEVKKLLDRLKENNEKIREDVERLLRELEEHTKKLEEDVTR

SEQ ID NO: 17655 - protein, 60 aa, Artificial Sequence
  Synthetic
SEEERVLKELEDVLREHKRKADESSRKLEEVHRRHRKRMEESKRELEEVHKEAKDRITKN

SEQ ID NO: 17656 - protein, 55 aa, Artificial Sequence
  Synthetic
EELEDVERKARELEERNKKLLKDSEEATEELRRENEEMLEESKRRTEKLEREVRT

SEQ ID NO: 17657 - protein, 57 aa, Artificial Sequence
  Synthetic
DKVREVLRESEKLLEDWDRELKEVLKDFKRTLDELEERLRDVLRKNKKSLEDLKRRG

SEQ ID NO: 17658 - protein, 55 aa, Artificial Sequence
  Synthetic
DRIMRELRELNRRLDESVKEIRDRLRRILDKLRKMIEKLKKELEDTDRELEERVR

SEQ ID NO: 17659 - protein, 57 aa, Artificial Sequence
  Synthetic
SKAEEVLKTSEKLLEEWRRRVKEVEDRNEETIKRLKEELDRALKENEESLRELEKRG

SEQ ID NO: 17660 - protein, 55 aa, Artificial Sequence
  Synthetic
DRISEELKKLNEELERELRKLSEELKEVDREAKEEIRRLVEELREIDKRLEEETK

SEQ ID NO: 17661 - protein, 57 aa, Artificial Sequence
  Synthetic
SEAEKVLTDFRDALEKDRERNERVLRENEETIRRDKEENERVLRENDKSLKELRKRG

SEQ ID NO: 17662 - protein, 55 aa, Artificial Sequence
  Synthetic
DRIKKTLERLLRESKKASEKLKDDLRKLDKRSKEESRRLTERLREIDEELRRRVD

SEQ ID NO: 17663 - protein, 57 aa, Artificial Sequence
  Synthetic
SEAEDVLRRFEEELRRDDEKNERVLRRNEETNRRDDETNRDVLRRNKESLDKLRKRG

SEQ ID NO: 17664 - protein, 55 aa, Artificial Sequence
  Synthetic
KRIKDELRKLLKRSEERSEELRRRLEDLDRRSKETSDKLREELERLDRDVERKVN

SEQ ID NO: 17665 - protein, 57 aa, Artificial Sequence
  Synthetic
SEAEKVEDDVRRVLETDEKKNRDVLDTNRRTIEEDRKRNEEVLRKARKMLEDLKRRG

SEQ ID NO: 17666 - protein, 55 aa, Artificial Sequence
  Synthetic
ERLRETLEELLRRSDERSRRIMEDLKRLDTDSKRVSEELKRRLEELLKDLERKVR

SEQ ID NO: 17667 - protein, 59 aa, Artificial Sequence
  Synthetic
SEVDEITKELEESLKDLDRVVRELREKIKKIDKELAETVDKLTEEAKEILKTLRDIIRR

SEQ ID NO: 17668 - protein, 62 aa, Artificial Sequence
  Synthetic
KKLKEKVDRVHKRHKDRLDEIKRKLKKVLEDNRETLERIKRKLRKVLEDLKRMLDELERELR

SEQ ID NO: 17669 - protein, 60 aa, Artificial Sequence
  Synthetic
KETEDLVRRLRKVLKELEERVRTLMRDNERVNKEIADKIRRLREKLREEDERVDEVVKRR

SEQ ID NO: 17670 - protein, 55 aa, Artificial Sequence
  Synthetic
REVLREMDERVKELEERLERVLRKSKTDADRWRRELKRVLEEHDKTVKEIREKTR

SEQ ID NO: 17671 - protein, 61 aa, Artificial Sequence
  Synthetic
KEKDEVVKRYEDRIKEIRERLKEVVTEHEDRLRKWRKDLEEVVERNRRSIKKIDEEVKRRG

SEQ ID NO: 17672 - protein, 55 aa, Artificial Sequence
  Synthetic
EDVVRKLDEDLKRNEDHLEEVRKELERLNEEIEKLIRDLLEILRRIDKELRDKLE

SEQ ID NO: 17673 - protein, 61 aa, Artificial Sequence
  Synthetic
DEEKDVTRRVREVIKRLEEELEEVVRRHRESLKRLKERLEEVVRRNRKSIREIEKEVKDAG

SEQ ID NO: 17674 - protein, 55 aa, Artificial Sequence
  Synthetic
EDVDRELARMLEELRDLLRRLAEELKRIDEELEKELRDVARELEKIDRDMREELR

SEQ ID NO: 17675 - protein, 61 aa, Artificial Sequence
  Synthetic
DERKEVEERYRREIERIKTKLKEVVKRHEDSLKKIEDDLEEVRRDNERSIKEIREEVRKKG

SEQ ID NO: 17676 - protein, 55 aa, Artificial Sequence
  Synthetic
EDVDRELKEDLERNERHLEEVTRRLRKIDKDLKEKLKRLEEELKKIDREARERLR

SEQ ID NO: 17677 - protein, 60 aa, Artificial Sequence
  Synthetic
KEIEDVKRRLEELDRRIKELVDRVRRKLEEVDTRAEKELRDVRRRLEELLERLEELIRRG

SEQ ID NO: 17678 - protein, 58 aa, Artificial Sequence
  Synthetic
KELRDVIKENEDTLRRLKEEVEKVTKENEETLRRIERELDKVERDVERRIRELEEERR

SEQ ID NO: 17679 - protein, 57 aa, Artificial Sequence
  Synthetic
SEVEKVLEDNKRSIDRLEEELRKVTRTSRELLKEWAKRLEDVLRDVKRAVDELETRG

SEQ ID NO: 17680 - protein, 59 aa, Artificial Sequence
  Synthetic
SDEIRKLKEELKRLDEEAARILETIMRRNKDLNDRLREIIETLKKRLKDLLKEVEDRAR

SEQ ID NO: 17681 - protein, 60 aa, Artificial Sequence
  Synthetic
DAEKLREDVERTLRRLRKELKDSIKRNREELERLERKLRKSIKETEDEVRKLEEKLERRL

SEQ ID NO: 17682 - protein, 55 aa, Artificial Sequence
  Synthetic
DDVRRLVEKIEREVRKLIEDHKKKSEDIVRTVEKLIEDHKRRVDRISEEVEEELR

SEQ ID NO: 17683 - protein, 61 aa, Artificial Sequence
  Synthetic
SKEDLKRKVKKILEDVERELRRSIEDTERLLREVEKRLEDSVRENRRKLREVEEKLRRRLK

SEQ ID NO: 17684 - protein, 55 aa, Artificial Sequence
  Synthetic
RRVDELVKEIEERARKLIKEHRDRVRELLRELEELIERHKELSERILKELEELLK

SEQ ID NO: 17685 - protein, 58 aa, Artificial Sequence
  Synthetic
SEKEEIARRLEKVHREHREELKRLEDRLREVLKRNRETIEDIRRKLEEVLRRLRERLV

SEQ ID NO: 17686 - protein, 56 aa, Artificial Sequence
  Synthetic
EEKLRRDVERIVKEAEDTLRELERVVRELEKEVRETDKRLDERVKELEEKVRRAAK

SEQ ID NO: 17687 - protein, 59 aa, Artificial Sequence
  Synthetic
SEEEDARRLLEEVERALREIKKRLKELLERHRRAVEELKKRAEDLLDEHRRAIERIADE

SEQ ID NO: 17688 - protein, 55 aa, Artificial Sequence
  Synthetic
EEIKRRLKELAKDLRRAIKEVKERLKESHDELKRAIEDVKRKLEELDEKLKRDED

SEQ ID NO: 17689 - protein, 57 aa, Artificial Sequence
  Synthetic
SERERVERSVEELIRRYREVLEESERRNRKLLKRYEDALKKSREDNKRLLDELRRAN

SEQ ID NO: 17690 - protein, 56 aa, Artificial Sequence
  Synthetic
REDAERLLERIERHLRRSEKTSEELNRRLEDHARRSIEESKKLNEELERKLRELER

SEQ ID NO: 17691 - protein, 57 aa, Artificial Sequence
  Synthetic
SSEETLRDINRKISKAIEEIEREAREIDRELRKAVEDLKREAEEIDERVREVIERIG

SEQ ID NO: 17692 - protein, 62 aa, Artificial Sequence
  Synthetic
TEVKKVLDKNEELLKRWEDRLREVLERNRKTLREIERELEEVLRKNRESIKKLKRELEEASR

SEQ ID NO: 17693 - protein, 57 aa, Artificial Sequence
  Synthetic
SSEEDLKRIDDELDKMVKDIERKIRRIDTELERVVKELKEDIERSLERLREVVERIG

SEQ ID NO: 17694 - protein, 62 aa, Artificial Sequence
  Synthetic
RDVRRVLDENRKTLEDLKRKLKEVLDRNRETLKRIEKELREVHEKHNRALDELRKELEDRRR

SEQ ID NO: 17695 - protein, 57 aa, Artificial Sequence
  Synthetic
SVEEEAEDILRRLDKTVRDLEREAEKIDEDLERVVRKLEEELRRSLEELRKVVEEIG

SEQ ID NO: 17696 - protein, 62 aa, Artificial Sequence
  Synthetic
RDVTRVLRKAERVLKEIEEKLRDVLRRNRETLKRIEDELERVHRDHNRKLKRLKEELDERRR

SEQ ID NO: 17697 - protein, 56 aa, Artificial Sequence
  Synthetic
DEDRDVEEKIKKIIKAAEDVNKESEERITELKKRLREIHERSERLIRRIEEEAKKK

SEQ ID NO: 17698 - protein, 56 aa, Artificial Sequence
  Synthetic
KKKLDEIIERLRKLLEDLEERNRRVIKELEDLIKENEELNRKVIRDLEKLVEDAER

SEQ ID NO: 17699 - protein, 55 aa, Artificial Sequence
  Synthetic
DEEDEVRKRVEESERESRKLLTDVKREADRLKEHDKRLLDEVKKLLDKIREDLKK

SEQ ID NO: 17700 - protein, 60 aa, Artificial Sequence
  Synthetic
REELKRELDRIIEELKELNKRLEERLRELIRDWERVSRELAERLKRIIDKARRLLEEVAR

SEQ ID NO: 17701 - protein, 57 aa, Artificial Sequence
  Synthetic
DEVEELLKELKDLSRESVRELRRLDEELKDLSRRSLKRLTDLDEELRREVEERRKEN

SEQ ID NO: 17702 - protein, 55 aa, Artificial Sequence
  Synthetic
ERLKKLADDSRKRLRDVERHHEKLVEDSERRLKTIKDHHKKAVEDIRRDLRETKR

SEQ ID NO: 17703 - protein, 56 aa, Artificial Sequence
  Synthetic
SEIDEVLKEIKRIIDELRERNRKHNEEVKDRIRRLEEELRKDLKDLKEIVERLAKS

SEQ ID NO: 17704 - protein, 58 aa, Artificial Sequence
  Synthetic
EAADRARELEKELKDISDTSRKSNEELRKRLEEIKDRVRKEIEKLLRELEEIVKEKRR

SEQ ID NO: 17705 - protein, 60 aa, Artificial Sequence
  Synthetic
DEEKETIKRHRESVREAERRLRDTLRRNRELVERLKRTLEDILRKHEKLVEELEEMAKRG

SEQ ID NO: 17706 - protein, 55 aa, Artificial Sequence
  Synthetic
EELKESHKDLKKIHEDAERRVRESHTDLRRIIEKVKEDLERSHRKLKRIADETRK

SEQ ID NO: 17707 - protein, 57 aa, Artificial Sequence
  Synthetic
SEMEEVLERDERKVRELEREIEKNLRDHKDEVRRLREDLERVLREDEKLVRELRKKN

SEQ ID NO: 17708 - protein, 59 aa, Artificial Sequence
  Synthetic
EELEDRMRRSSKRLEEVLRESEERLKRSDEDLRRVIDEIRRRLEESTRRLEETIKELKD

SEQ ID NO: 17709 - protein, 60 aa, Artificial Sequence
  Synthetic
SEREEVLKDIRRLLDEVRRRIEDLLEKLRRLNEEVKEKVKESEKRLRDLMRKAKELMKRG

SEQ ID NO: 17710 - protein, 55 aa, Artificial Sequence
  Synthetic
EDIKRLIEELEKLLKEAKEKAEDLTREHDDTLKKIRERHKEIIKDIEDKLDTDRQ

SEQ ID NO: 17711 - protein, 60 aa, Artificial Sequence
  Synthetic
DEEEELKKKLKAILEDLKREMREHEEKLRRSLERVARTAERHKETIKRIIDRLRKEAEDV

SEQ ID NO: 17712 - protein, 55 aa, Artificial Sequence
  Synthetic
EEVKRIAEDIKRVLEEIRKRSREILEEVKRLHKKIKDDSRKLLKDLEKLVREIRK

SEQ ID NO: 17713 - protein, 56 aa, Artificial Sequence
  Synthetic
SVEDEARRLEEKLRELTKRAREALEESNRRHRKSVEEVRRSLKKNHEKLEELARRV

SEQ ID NO: 17714 - protein, 55 aa, Artificial Sequence
  Synthetic
ERLLKELEDLIEEVERELRRVLTESKRLNEELRKRVKEIEERSEELIERLDREVR

SEQ ID NO: 17715 - protein, 56 aa, Artificial Sequence
  Synthetic
SMDESMETLTRELEDLLRKVEKKLRDSNEHHRELLEEVKRRVEENHKELDELLRRA

SEQ ID NO: 17716 - protein, 55 aa, Artificial Sequence
  Synthetic
EELLTKIRKLIRDVEETVREAERESRALDERLERTVRDVEEKSKRLIEELRRRAD

SEQ ID NO: 17717 - protein, 56 aa, Artificial Sequence
  Synthetic
DAEEEIRRIDKHHEENVRKAEEDIRRLIEHHKENVERVDRELRKIIREVEEVIRRV

SEQ ID NO: 17718 - protein, 59 aa, Artificial Sequence
  Synthetic
ERLVRELIRRLERTDEEHHKKVRRILEELKRIDEEHHRLVRRILKALKDIIKRLREEVK

SEQ ID NO: 17719 - protein, 56 aa, Artificial Sequence
  Synthetic
SLEEEIEKIERHHRKLVEEARRELKRLEDKLEKLNRDSRKRLKELAERLKKLIDEI

SEQ ID NO: 17720 - protein, 59 aa, Artificial Sequence
  Synthetic
ERVARRVLDELRRLNEKLRRMVEELVKEIERLIKKVKDDSEDVMRKLKELLKRLEDRAR

SEQ ID NO: 17721 - protein, 59 aa, Artificial Sequence
  Synthetic
REKEELLERLKKVLERTERVIRDLERRLREVLERSRKLAEDLVERLERSLKTLEKLARE

SEQ ID NO: 17722 - protein, 55 aa, Artificial Sequence
  Synthetic
EELREIYKRHEDLLRTAEERLRKVYDDHRDLLRKIDEDLKRLKERHEELLREIRR

SEQ ID NO: 17723 - protein, 60 aa, Artificial Sequence
  Synthetic
EEKDRLKKRLEELNREHEELVRRISERVRRLLEKAEREIRTLKKRLDELNKELEEIIRRD

SEQ ID NO: 17724 - protein, 59 aa, Artificial Sequence
  Synthetic
EKVKKELEDVERHSRDSSRRVKEELERLKEELDRRLRKVKEDLERVKRHSKKLVDDAKR

SEQ ID NO: 17725 - protein, 61 aa, Artificial Sequence
  Synthetic
SEREDLRRELEELLREHEEVVKEVKRRLEELLREHEEIVRELTERLKTINEDLKRVIKRDK

SEQ ID NO: 17726 - protein, 59 aa, Artificial Sequence
  Synthetic
EEAEKELRDVAKRLRESSREVRETVRDVADKLRESSKKLEEELRRVKKHSKKLLDEAKK

SEQ ID NO: 17727 - protein, 59 aa, Artificial Sequence
  Synthetic
SLEDLLRKVEEDAKRSIEKLEKDLKRVEDKHRELVERVKRRLDDVRRKLEEIIRDAERK

SEQ ID NO: 17728 - protein, 59 aa, Artificial Sequence
  Synthetic
ERVVREVLDELRKLLDDHNKKVKTVLDELKRSLDKLREEVKKVEDKLEEILKTLKETVR

SEQ ID NO: 17729 - protein, 55 aa, Artificial Sequence
  Synthetic
SLEELIREIEKELDDLLREHEDLLRKIKEEIERLIREARELIKRLEEENEELRRN

SEQ ID NO: 17730 - protein, 59 aa, Artificial Sequence
  Synthetic
EEEVKREIDRVRRVIEELRESVERLREEVRETLRRLKEHVKKDVEDHKETVKEVERRTR

SEQ ID NO: 17731 - protein, 56 aa, Artificial Sequence
  Synthetic
DTEDLIREIRRRLEESVRENKELLDRLRERLEESIKRNEDLLKRHRENSKRIADRV

SEQ ID NO: 17732 - protein, 58 aa, Artificial Sequence
  Synthetic
ELVKEMIDRLRDLLRRHKEESKRLVEEVKKLLDRHREESERLVRELDKMNKDLEDRAR

SEQ ID NO: 17733 - protein, 55 aa, Artificial Sequence
  Synthetic
DTKELLDELRKRLEDSARRVEELEKRVKDELERLKKRSEELLDEIRKRMKDVRDR

SEQ ID NO: 17734 - protein, 56 aa, Artificial Sequence
  Synthetic
KDELVRRLDETLKDHDRKLKELVDEAKELLRRYEEESKRLKRELDEILRRVREEAK

SEQ ID NO: 17735 - protein, 60 aa, Artificial Sequence
  Synthetic
REIEEVRKKVEKILRDYDKVVKDIVEKVRRILEEYRRKSEKLTREIEEILRRLREVIKRD

SEQ ID NO: 17736 - protein, 56 aa, Artificial Sequence
  Synthetic
EDSLREIRKEARRLHEKSKKLLDEIRKRAEDLERETKKLLDDIKRELEDVVRELEK

SEQ ID NO: 17737 - protein, 56 aa, Artificial Sequence
  Synthetic
RELEELLKRAEEVIKELKKSIDTMKEENDRLITELAKRVEDLKKRNDDVLERLKKD

SEQ ID NO: 17738 - protein, 56 aa, Artificial Sequence
  Synthetic
EEVLKEIDKRLKELEKEHEKVNRESEKRLEELLRRVEKVNRDSERELERLREERET

SEQ ID NO: 17739 - protein, 57 aa, Artificial Sequence
  Synthetic
SEIEEVLERAERLLRRVAEALRRTTKELEDLNREVADLLRRTTEKAERLIRRVKSKI

SEQ ID NO: 17740 - protein, 56 aa, Artificial Sequence
  Synthetic
VEELKRVADEVVKKADDLVDEDRKLAKDSVDELRRLVEKDEKLAKDVVEEVEKLAE

SEQ ID NO: 17741 - protein, 60 aa, Artificial Sequence
  Synthetic
SLEDAVRKARELIKRAEDILRRAVEEAKKLHKRSKEILEKAVEDAKRLYEEAKDAARKAG

SEQ ID NO: 17742 - protein, 56 aa, Artificial Sequence
  Synthetic
AKTILDKAREVAERVARLARKLLEDSRKVARESAELAKRLLEYAKKSAEDAKRKAK

SEQ ID NO: 17743 - protein, 60 aa, Artificial Sequence
  Synthetic
SIDEVLKELEDVARKSKEKNKRVHDDDERVVREVHKENRRVLRELEEMAERVRRELEKRG

SEQ ID NO: 17744 - protein, 60 aa, Artificial Sequence
  Synthetic
EEKVVRRVKDIARHNLELADRSVEESRKSVKENKDLVDRSVKKVEDLVRELKRLVDEIKR

SEQ ID NO: 17745 - protein, 60 aa, Artificial Sequence
  Synthetic
SIDEALTRLERAVEESHKRNEDVHRRDEEAVREVHKRNREVVKKLEDEVRKVIERLRRRG

SEQ ID NO: 17746 - protein, 60 aa, Artificial Sequence
  Synthetic
EEEVVRRIDELVEHNKDLVRRSVDESDKSVETNKDLVEKSVRRVDKLVKDLRRLVDEIER

SEQ ID NO: 17747 - protein, 60 aa, Artificial Sequence
  Synthetic
KIDEALKRLREVVKRSHEENEEVHKEDEKVVRELDKENKDVLKELDEAVKRVEKKLRDRG

SEQ ID NO: 17748 - protein, 60 aa, Artificial Sequence
  Synthetic
EDEVVKRIDELVTHNKRLVEESVERSKESVDRNRRLAEKSVEDVRRLVEELKKLVDDITR

SEQ ID NO: 17749 - protein, 59 aa, Artificial Sequence
  Synthetic
SLEEVLRRLEKVVRDSDKRLEEVLTRLAKVVRESNKRDEDVHKELRDVVRRVEELLERS

SEQ ID NO: 17750 - protein, 56 aa, Artificial Sequence
  Synthetic
EETVDKLVEDNERLVREIVKEVDELVKRNEDRARESVDESRKLVRRIEERVREETR

SEQ ID NO: 17751 - protein, 56 aa, Artificial Sequence
  Synthetic
SVEDVLREAKRVLDEVRERLREVNTETNKVIKDVKKESDDVNRETNELIERVAREV

SEQ ID NO: 17752 - protein, 55 aa, Artificial Sequence
  Synthetic
EEVERLVDEVRKLVKRLVEHVKKLAKEIKELLERNVRHVEEVAERIKRLIKETKD

SEQ ID NO: 17753 - protein, 60 aa, Artificial Sequence
  Synthetic
ELREDVERVVDEIRRLVEENVRRIDEVAKDIKRLADDNVRRVKELVRKIEEDIRRLKEEG

SEQ ID NO: 17754 - protein, 56 aa, Artificial Sequence
  Synthetic
ERVLKKLKEVIEDVERKSRDALRRLEEAIRRVRRESERVNRELDEVIKRVTEELKK

SEQ ID NO: 17755 - protein, 58 aa, Artificial Sequence
  Synthetic
SAREKVEKVVKEVEELVKRDVEEVERIVEEVKKLVTEDLKISEEIVERVDRLIRELKK

SEQ ID NO: 17756 - protein, 56 aa, Artificial Sequence
  Synthetic
ERVLKKLEDVVRRVEKESEDALRRLKEVIKKVKRESEEANRKLEEVIRRVVERVRR

SEQ ID NO: 17757 - protein, 59 aa, Artificial Sequence
  Synthetic
SRSEKLVDEARKMVERSKEIVDKSEREVEDVVRRARRNVEKVLKDAKKVVDEVDELTKR

SEQ ID NO: 17758 - protein, 55 aa, Artificial Sequence
  Synthetic
EDVLREVEELVRRVEEENDRVLKRAKELVEDVKRKHDRVLETVRKLVEDVTRRLK

SEQ ID NO: 17759 - protein, 57 aa, Artificial Sequence
  Synthetic
DEVDKVKEELERVIKEVDERNKRSSERLEEVNRKIRKEIKEVVERLKELIERVLRKV

SEQ ID NO: 17760 - protein, 56 aa, Artificial Sequence
  Synthetic
VDEIRRLVEEVLRRARKLVEEDKELIKKSLKDLKTIVDELRKLLEDVIREAERTAR

SEQ ID NO: 17761 - protein, 55 aa, Artificial Sequence
  Synthetic
EEVERILEDVRRMIEDHRRKVEEIVKRSEDMARRLIEEVKRIVEESKKLADELKK

SEQ ID NO: 17762 - protein, 55 aa, Artificial Sequence
  Synthetic
EDVRRELKRLVDEVKKRNDEVRERDKEVVDRVKEVLDRVRETDRRLVEEVRRRAN

SEQ ID NO: 17763 - protein, 55 aa, Artificial Sequence
  Synthetic
SRVEKILEDVKEEIKKHKEEVDRIVKRSREMAKRHIERVDEILERSRRMIEELKK

SEQ ID NO: 17764 - protein, 55 aa, Artificial Sequence
  Synthetic
EDVERELRRLVEEVEKRNEDVEREDRRLVEEVKKRNDEVRKEDRRLVEEVKERAR

SEQ ID NO: 17765 - protein, 61 aa, Artificial Sequence
  Synthetic
DELEKVEKDVRRLLEKVRKRIDEVRKEVERLSRESEEVTRRVLETVEKLLKDVERVIRETL

SEQ ID NO: 17766 - protein, 56 aa, Artificial Sequence
  Synthetic
VEEVLETVKRLIERIEEEIEKVVKDVERLVRESIKHSRDVLKEVDDLIKRIRERVK

SEQ ID NO: 17767 - protein, 56 aa, Artificial Sequence
  Synthetic
DDDKRIREILRRVHEKSEKVLRKVRKRLEEVRRESEEVVRRVKKDLDRVLEEVRRK

SEQ ID NO: 17768 - protein, 55 aa, Artificial Sequence
  Synthetic
EDVAREVEEIAKRTIDRVEAIVREVERIARESIDNVRRVVEEVKRAVTELIKRVE

SEQ ID NO: 17769 - protein, 56 aa, Artificial Sequence
  Synthetic
SEDETIRRIVRTVHEESRKSTEDVRREVERVLRESEEVVKKVKKKVDDVLKRVEET

SEQ ID NO: 17770 - protein, 55 aa, Artificial Sequence
  Synthetic
EEVAREVTKIARDTIRENEEIAKEVREIVERSIKNLEEVAEEVERVVRELIEARR

SEQ ID NO: 17771 - protein, 56 aa, Artificial Sequence
  Synthetic
SRDEKIRDILRRVLKEVRDSTKKVEEDLEDVHRRTEEELRKVKKRLDEVLKRVRDE

SEQ ID NO: 17772 - protein, 55 aa, Artificial Sequence
  Synthetic
EKVAEEVKRIADRLIDLNRRIAEEVDKIVRDSIKKVEEIVTEVEKIVEKLIRDVR

SEQ ID NO: 17773 - protein, 55 aa, Artificial Sequence
  Synthetic
DRLEKIVEEVRRLADELIRHVERNVREVEKAVRESIEHVRDVAEKVERAVRELEK

SEQ ID NO: 17774 - protein, 55 aa, Artificial Sequence
  Synthetic
EEVRKELKRVIREVEKVNKESNDVTRKVKEESEKVLKEVEKRLREVIRRVKEKIR

SEQ ID NO: 17775 - protein, 55 aa, Artificial Sequence
  Synthetic
SEVEDVVRKVEKLVRDLIKHVEENVRRVEEVVRKLIEEIKRIAEEITRIAEELAK

SEQ ID NO: 17776 - protein, 55 aa, Artificial Sequence
  Synthetic
EEVEKVLREVVKEVEKVNRESREVTRRVLEEAKEMLERVKKIVKEVIEKVRRVVK

SEQ ID NO: 17777 - protein, 60 aa, Artificial Sequence
  Synthetic
SADREVEERLREVIERVKEALKRSKDVTDEVTRRVEKLDKESNDTSREVIRRVEDMLSRV

SEQ ID NO: 17778 - protein, 59 aa, Artificial Sequence
  Synthetic
DELVKRIVEKVDKAVKDLEKLVRENVERVRRAVERSRKTVEDNVKRSRDVVRELRERVR

SEQ ID NO: 17779 - protein, 60 aa, Artificial Sequence
  Synthetic
SSIDEVREEIRRVIEEVRKLLEESKKDTDRVRREAEDMDRKANETVEEVERRVREVLRSV

SEQ ID NO: 17780 - protein, 59 aa, Artificial Sequence
  Synthetic
EEVVRRILKRIEEVLKKLRKAIKDNVDRVRDAVRRSRRTVEDIVRRVREVLERLEREIK

SEQ ID NO: 17781 - protein, 56 aa, Artificial Sequence
  Synthetic
SLAEEVERRLEESHKRARKLVKEVKEALEESHKESDRLVREVEKELKRVAEEVRKE

SEQ ID NO: 17782 - protein, 56 aa, Artificial Sequence
  Synthetic
VEKVRDLVRKTTEKVEEVVRRLRELVKENLDEAKRVVEDLKRKVKEIEEKVKEDSK

SEQ ID NO: 17783 - protein, 56 aa, Artificial Sequence
  Synthetic
SMAEKVDEVSKRSKEELKRVVKEVHEVSTRVEKVVKDVLREVEKVSKESTDVVDRV

SEQ ID NO: 17784 - protein, 59 aa, Artificial Sequence
  Synthetic
REVVDKVVRDLEKTVKDVKEVVDRAVTASKELVDRIRRLAEEVVRALERTVDKVRRDAK

SEQ ID NO: 17785 - protein, 56 aa, Artificial Sequence
  Synthetic
DAREEVDEVSRESKEELKRVLDEVDDVSEKSRKTVRDMLRKNKEVVDEVEKTLEDV

SEQ ID NO: 17786 - protein, 59 aa, Artificial Sequence
  Synthetic
KEVVKDVVRKLRETVKRVREVAEEVVRELEKTVDEVRKRADDSVKKHRDLVKEVKEAAD

SEQ ID NO: 17787 - protein, 56 aa, Artificial Sequence
  Synthetic
SAEEDVERVVREVEREVREALRRVREVSERSREDVRRVVDENRKVAEEVEKRVRDV

SEQ ID NO: 17788 - protein, 59 aa, Artificial Sequence
  Synthetic
EEVVREVVKKLREIVKDIRRLAEEVVRRLEDTVRKVREIAKRSVDAHRELVRRVEERAR

SEQ ID NO: 17789 - protein, 56 aa, Artificial Sequence
  Synthetic
SSAEEVERVLRRVEEEDRRLVAEVRRVLKESRRTLEELVRRVKEVLEEVRKEVERI

SEQ ID NO: 17790 - protein, 56 aa, Artificial Sequence
  Synthetic
AKELIKRVEEIVEESRKLIDEAIREVEENVDRSRKKIKELIDRVREILKRARDRAR

SEQ ID NO: 17791 - protein, 56 aa, Artificial Sequence
  Synthetic
DSEEEVKKVLDEVRRRDEKLVEEVRKVNEDSLDTLRKLAEEVKRKLDEVRERVERL

SEQ ID NO: 17792 - protein, 56 aa, Artificial Sequence
  Synthetic
AEELIREVERIVKKSEDMIREHIRKVEENVEESKKEIEELIRRVDDILREAKEAAD

SEQ ID NO: 17793 - protein, 56 aa, Artificial Sequence
  Synthetic
SGEEDLERVLDEVRRRDKKLVEEVRKRNEDSLRRLERLAEEVERVNEDVLKKVEEL

SEQ ID NO: 17794 - protein, 56 aa, Artificial Sequence
  Synthetic
ASEVRKLVEEIVTDSRRRITEHIRRVEENAKDSERVIREHKERVKEILEKVRRAAE

SEQ ID NO: 17795 - protein, 59 aa, Artificial Sequence
  Synthetic
SEVEKLVEDVKKAVKEVLEEAKENVRKVEDVVRRVLERAEDNVEEVKKVVATLVDLVRR

SEQ ID NO: 17796 - protein, 59 aa, Artificial Sequence
  Synthetic
EELMREVRRVIKEVRDRVRDVLDEVRRVNEEVNRRVRKVLEDVRRVNERTKEDLDRESK

SEQ ID NO: 17797 - protein, 59 aa, Artificial Sequence
  Synthetic
SEVDKLVREVDELVKKSKDNIDKLVKRVREMVEESKRKADRNVEEVERVVREIKDLARR

SEQ ID NO: 17798 - protein, 59 aa, Artificial Sequence
  Synthetic
DELVKKVRDRLEEVERRTRKALEDVKRVLEDVKRLTDTALREVERVNRKTEEEVDREIR

SEQ ID NO: 17799 - protein, 59 aa, Artificial Sequence
  Synthetic
DKVDRVVKEIEEAVKENLDRVREIVKEVRDLVRENLEEVRKSVEDVKRLVKEILELVRA

SEQ ID NO: 17800 - protein, 59 aa, Artificial Sequence
  Synthetic
EDAVRKVEEVLREVEKRSTEALKELRDVLREVRRESEEALDENRRVTEEVKKKVEDERK

SEQ ID NO: 17801 - protein, 59 aa, Artificial Sequence
  Synthetic
SEVEEIVREIRDLVRKNEERVKKIVEDVRRAVEEILELAERSVEKVKRLVDDLRRLAEN

SEQ ID NO: 17802 - protein, 59 aa, Artificial Sequence
  Synthetic
EEAVRKVDRVLEEVEKRSRDALKELEEVLKEVERLAREVLEKNERVTEAVEDLVTKAAK

SEQ ID NO: 17803 - protein, 59 aa, Artificial Sequence
  Synthetic
DEEERVREELERVNEEVKELKKEVETVNKRVHETLEKVIREVKKVNDDVHRTVEDLRRR

SEQ ID NO: 17804 - protein, 56 aa, Artificial Sequence
  Synthetic
VEEIVKKIKEVVDRTRKLAKELVKESRDLAEDVKRLIKRLVEDSRRLVEEIKERAR

SEQ ID NO: 17805 - protein, 60 aa, Artificial Sequence
  Synthetic
SEEERVEKRLREVNKDVKRLVKKVRDVNRKVHEDTKRLVEEVRRVNRDVHRRVKELREAG

SEQ ID NO: 17806 - protein, 56 aa, Artificial Sequence
  Synthetic
VDKIVEEIDKVVTETRELAERLVKESEDNVERSRDLARKLVEKSERLVKEIDDRAR

SEQ ID NO: 17807 - protein, 59 aa, Artificial Sequence
  Synthetic
SAAEKVREELERVNRRVEELLKKVKKVNEEVRDIVRKVVREVERVNKEVEEEVKRLVDQ

SEQ ID NO: 17808 - protein, 56 aa, Artificial Sequence
  Synthetic
VEEIVKKIKDVVKRTDELAERLVETSERLARTIKKVAEDLVRDSKRIVDEVRTRIT

SEQ ID NO: 17809 - protein, 59 aa, Artificial Sequence
  Synthetic
SDEDRVRRRLEEVNREVEELLRDVERVNEEVKRRVKKVIREVEEVNKRVEEEVKRLRDE

SEQ ID NO: 17810 - protein, 56 aa, Artificial Sequence
  Synthetic
VEDIVRKIDDVVRETRELAKELVKHVRDVVEDVRRLVKELVDLSEKLVKEIRDKVE

SEQ ID NO: 17811 - protein, 59 aa, Artificial Sequence
  Synthetic
SEVEKVVKEMEDLARENERLAREIVKDVERLVREIEDTVRRSVETTRRLVEEIRELAER

SEQ ID NO: 17812 - protein, 59 aa, Artificial Sequence
  Synthetic
ERVLELLERVLRELEKVVEDSKRRIKEVLDELRKAVDKVKKEDKKVHDELRKVVEEVRT

SEQ ID NO: 17813 - protein, 60 aa, Artificial Sequence
  Synthetic
RVEELLRKVITELDRVLEEVRRRNEASIEELDRVLKEVERLNKEVDEELKKVLEKVRKDV

SEQ ID NO: 17814 - protein, 59 aa, Artificial Sequence
  Synthetic
EEVVRRIVEEIKKVIDELREESRRTVREVEKLVKEILDRSRKTVEEVKRLAEEIERKAK

SEQ ID NO: 17815 - protein, 60 aa, Artificial Sequence
  Synthetic
RVKELVDEVKRKVEESMRESTERNRTATEKVEKSLRDSEKLNRDATRKLKKVVDDVRREG

SEQ ID NO: 17816 - protein, 55 aa, Artificial Sequence
  Synthetic
EEVVKKVEDVVERNKDLVRKSVEHIDKVVKENRELVKRSVEHIDRVVKEARERAR

SEQ ID NO: 17817 - protein, 60 aa, Artificial Sequence
  Synthetic
SAEELVKRVLDDVRRSAEESERLNREATEEVKRSLEKSRKDAERVLRDLERVVRKVKTEG

SEQ ID NO: 17818 - protein, 55 aa, Artificial Sequence
  Synthetic
ERVVRKVEAVVERNRKLVEDSVRHIREVVKRNEDLVRRLVEEVKRVVKKAEDKAR

SEQ ID NO: 17819 - protein, 60 aa, Artificial Sequence
  Synthetic
DVEELVKKVEDMVRKVIEEVKKRNTDVTRRVEESLRKSTELVREAEERLRRTLEELRRRG

SEQ ID NO: 17820 - protein, 55 aa, Artificial Sequence
  Synthetic
EEVVRKAEEVVKRAKELVARSVKHVDEVVRRNEELVTRLVRELDELVKEVRETAR

SEQ ID NO: 17821 - protein, 60 aa, Artificial Sequence
  Synthetic
RAERLVREVARRLEEVLKEVEKLNKDATDKVKKSLEDSRKKNEDVTREVRRVIEELRTRG

SEQ ID NO: 17822 - protein, 55 aa, Artificial Sequence
  Synthetic
EDVVRRAEELVERLRKIAEDSVRHLEEVVRKNERLVKESVDHVRTAVEELKETAR

SEQ ID NO: 17823 - protein, 59 aa, Artificial Sequence
  Synthetic
DAEEKVKEVEREVEKVIEEVKRDNTRVTEENKRVLDTVRERNKRVTDELRKVLEDVRRE

SEQ ID NO: 17824 - protein, 55 aa, Artificial Sequence
  Synthetic
EEVVKRIADVVKTVKRRVDESVKDIKRSVKETEDRVDRSVRHVEEVLKELRKASE

SEQ ID NO: 17825 - protein, 60 aa, Artificial Sequence
  Synthetic
SAEDKVRKVKKEVEKVIKDVKEENRRVTRENEEVLDRVKKDNERATRKLRKVVEDVRREG

SEQ ID NO: 17826 - protein, 55 aa, Artificial Sequence
  Synthetic
ERVVERIKRVVERVDELVRRSVKDVKDSVRETRKLVDDSVKDIDRVVKEARDRAK

SEQ ID NO: 17827 - protein, 59 aa, Artificial Sequence
  Synthetic
DAKDKVRKVLEEVKKVIEEVERRNRTVTRENERVLKEVKDRNTEVTKELKKVVEDVKRR

SEQ ID NO: 17828 - protein, 55 aa, Artificial Sequence
  Synthetic
EEVVDRVRRVVEEVTELVRRSVEEIKESVKTTRDLVRKSVKNIRDLVEEAKRRAD

SEQ ID NO: 17829 - protein, 59 aa, Artificial Sequence
  Synthetic
DEVETVVRDVKRLVRENERKVREIVKTVDKLVKENEDLVKRSVEELKKLAKEIKDLADE

SEQ ID NO: 17830 - protein, 55 aa, Artificial Sequence
  Synthetic
EDLRRVKKEAEDVVRDSERLIEEVKRRVKKVVDDSRRKDEEALRDVERVIEEVRR

SEQ ID NO: 17831 - protein, 60 aa, Artificial Sequence
  Synthetic
SEVDDVVRRVKKLVKEDRDLVRDSVRKLDELVRDDKRLVDEVVERLERIVKEIEDLMREG

SEQ ID NO: 17832 - protein, 55 aa, Artificial Sequence
  Synthetic
EKLEEVLKMLEKVSDEVKKENDRALKKVEDVSREVKELNKEVLKRARDVVERVRT

SEQ ID NO: 17833 - protein, 59 aa, Artificial Sequence
  Synthetic
SSKEKVKKVLDKVKEVLDRVRELVKRVDRESEKVVEDVRRKNKRASEKVKTVIRDVEEK

SEQ ID NO: 17834 - protein, 56 aa, Artificial Sequence
  Synthetic
VDDVLRKVEEIVRKVKDMVRKILEKAERNVEETERVVTESKENADRIVKEVEDRAR

SEQ ID NO: 17835 - protein, 60 aa, Artificial Sequence
  Synthetic
SAREAVTEVLRKVREVLKRVEDENRKVSKELRDLLEEVERRNRDLTEKVKRLIDELKERG

SEQ ID NO: 17836 - protein, 56 aa, Artificial Sequence
  Synthetic
VERILEEAERIVKELEEVLEESLRNVKEILKKLEDALRKSEEDVRRILERVEEEAR

SEQ ID NO: 17837 - protein, 59 aa, Artificial Sequence
  Synthetic
REVEEVLRRIKEMVKRIEELVRRSEDRAKKLVDTNRDLVRRSEERFRELVKEIEDVARE

SEQ ID NO: 17838 - protein, 55 aa, Artificial Sequence
  Synthetic
EELERVLREVEKVVRDVRRRNEKATRDVRRSVEESRRLDKRALDEVRKRIEEVRT

SEQ ID NO: 17839 - protein, 61 aa, Artificial Sequence
  Synthetic
RVEEVLKRVLDKLRESNKDSERLVREALKEHEEVNKEVEDRIREVLRRVEEVLKKVEKDKG

SEQ ID NO: 17840 - protein, 56 aa, Artificial Sequence
  Synthetic
AEDIKRLVDEIVDTDRKLVEEVKREAKESVKESEELVERVKRKADRIVEEVEKTVK

SEQ ID NO: 17841 - protein, 60 aa, Artificial Sequence
  Synthetic
DEVEEVRKTIERLVDRIEDVVRRVLELSRDTVRKNEDLVRRIEEELTKLVEDIKDVSRKR

SEQ ID NO: 17842 - protein, 55 aa, Artificial Sequence
  Synthetic
ELLEEVERLLEEVLRKAEKVIEDARKLDEDVNRKSNKVIEDVARRLEKVLKEVKD

SEQ ID NO: 17843 - protein, 60 aa, Artificial Sequence
  Synthetic
SVEDVIRRVKEKSEEVLKRLKEVIDEVKKRSEDVLKEVEDAIDEVRRRSEEALDRVRRAG

SEQ ID NO: 17844 - protein, 56 aa, Artificial Sequence
  Synthetic
SEEARDLADRDVEDVERVVTDIRRLVEKNVRDVRRVVREIEDAVRRNVKEIDRRVK

SEQ ID NO: 17845 - protein, 60 aa, Artificial Sequence
  Synthetic
SVEELIERVKRRSEKVLRDAEKTIRDLKKDSKRVNDELEKVIRDVMEKSKTALDEVRRRG

SEQ ID NO: 17846 - protein, 56 aa, Artificial Sequence
  Synthetic
SEEARRLVERDVEDVKRLVEEIKKLVTDNVRTVEDLVRRIKREAEENVKEIKEEVR

SEQ ID NO: 17847 - protein, 57 aa, Artificial Sequence
  Synthetic
SDVDRAVETNDKVVTEIVERVKEVVERNREIVERISTTVDEMVRRNRDIVRRVAERV

SEQ ID NO: 17848 - protein, 57 aa, Artificial Sequence
  Synthetic
VRDLVREVLERSDELVKRVEEEVKRLLERNKKLLDDVTEAAARLLKRNKEVVEELDK

SEQ ID NO: 17849 - protein, 57 aa, Artificial Sequence
  Synthetic
SEVDRVVEENDRVVRKVEEVVREAVERNETVAERVKDTVDRMVRENEKIVDKVRKDV

SEQ ID NO: 17850 - protein, 57 aa, Artificial Sequence
  Synthetic
VEKLVRDVLRESEKLVDDVRRAVKKLLEDSEELVREVKEAAEESLRRNKKIVEDLTR

SEQ ID NO: 17851 - protein, 57 aa, Artificial Sequence
  Synthetic
DELETVLREVERVVTEVKKLNERTVRDDKEVVERVLREIDKLLKEIREKVKEVKKKL

SEQ ID NO: 17852 - protein, 55 aa, Artificial Sequence
  Synthetic
EDVERTVRKLLEEIKDSVRKSKEDVRRSVEEIERLVRKVKEDVKRLLRDIRERAK

SEQ ID NO: 17853 - protein, 61 aa, Artificial Sequence
  Synthetic
SKVEKALKKIEDVLEDIKRLVEEVVERDERLLERLEEENKRADEKSKELVKRLTDLVRENK

SEQ ID NO: 17854 - protein, 59 aa, Artificial Sequence
  Synthetic
REALERIREILEEVRKAVEDLLRKIKETLKRIRERVKRLIENLEKSLEDARKEVDRLRK

SEQ ID NO: 17855 - protein, 61 aa, Artificial Sequence
  Synthetic
DVDERIEELLRRIERLVEESERDVRRLKREIDDLVTKSLKTVEESLKRIKELVDRVSEEAK

SEQ ID NO: 17856 - protein, 56 aa, Artificial Sequence
  Synthetic
KDDVERVVRRVLKEIDDSTKEIRRIVKRVLEEIERTTRDDKRVIDEVRELIKETSR

SEQ ID NO: 17857 - protein, 59 aa, Artificial Sequence
  Synthetic
DADELVTEVRKRVRETLEEIRTILDEVRKRVKKTVEDIRTEAERVKREVDKLVKEVRDN

SEQ ID NO: 17858 - protein, 56 aa, Artificial Sequence
  Synthetic
DREIEKLLDDNRRLIEEVLRRIDELVREDEELVKRVLDRIRTVLDRIREEVDEVRR

SEQ ID NO: 17859 - protein, 59 aa, Artificial Sequence
  Synthetic
DVRELLKKVEDEVRRTLKEIERILKEVKTESDKTLKEVAELLERLDRDVKRLVKEVRDN

SEQ ID NO: 17860 - protein, 56 aa, Artificial Sequence
  Synthetic
KEEIRKLVERNKELVRDVLRRIKELLKRDKEMLEEIRERIKEIEKRLKELLERAKR

SEQ ID NO: 17861 - protein, 61 aa, Artificial Sequence
  Synthetic
SEIEEVLKRVEEMIRRSKKLTDKVLREVEKMIRELDKKTDEVLERSERLARELKELVRRDV

SEQ ID NO: 17862 - protein, 59 aa, Artificial Sequence
  Synthetic
RERIEEILRRVTEAIKRSKEDSERIRETVTRLIRESEENSKRNLERVKKVIDELREEIR

SEQ ID NO: 17863 - protein, 61 aa, Artificial Sequence
  Synthetic
DKLEEVLKRVEEMLRELDKETDDVLKTVEDLLRRLDELTDEVLKESRRAAEELKRKVDRDI

SEQ ID NO: 17864 - protein, 59 aa, Artificial Sequence
  Synthetic
EEKIREIEKKARKLIKDSRKNIRDILETVKRLIEESDKNIKENEKRVRKVIDELDKEIK

SEQ ID NO: 17865 - protein, 61 aa, Artificial Sequence
  Synthetic
REKEEIIKKVKDVVKRVKEELKKIVEESERLVREVEEELKRSNEKSRDLVRRAEEELEKKS

SEQ ID NO: 17866 - protein, 56 aa, Artificial Sequence
  Synthetic
EEELDRLIKRVEDRARKVLEDSKRTIEEIEKVARDVLRRSEETVKEVEEKARRALK

SEQ ID NO: 17867 - protein, 61 aa, Artificial Sequence
  Synthetic
SAVEEIVKEVERIVREAEKALKKSVDDNRRIVEDAVRTLKRLVEEAARLVDEARKELTKKS

SEQ ID NO: 17868 - protein, 59 aa, Artificial Sequence
  Synthetic
EDVLRELKRLLKELERVVEEVLRRDRKWLEDTRREVKRVVEELKRLLDELREVVERARR

SEQ ID NO: 17869 - protein, 61 aa, Artificial Sequence
  Synthetic
KELEDLVREIEDTVDRIEREIRKLVEDDHRSVRKAEEDNRRLVKESEDLVRRIEEEIRKKE

SEQ ID NO: 17870 - protein, 56 aa, Artificial Sequence
  Synthetic
EEVMRRLKEDIERLMEEIRREVEKLNETTKEVVKESLETHKRIIERIREVAEETRR

SEQ ID NO: 17871 - protein, 57 aa, Artificial Sequence
  Synthetic
SSLEELLKEIRKRVERIKEELDRALKEDHDIVRKALRELDEMLKKNEETVRRAMERI

SEQ ID NO: 17872 - protein, 56 aa, Artificial Sequence
  Synthetic
EDVVRKVLEELEEEARRVLRELRESLKRTEELVRRALETLKRSDEETKKLVEDIER

SEQ ID NO: 17873 - protein, 57 aa, Artificial Sequence
  Synthetic
SSLEELIKEDHRVVREAEKRLEELLKEDHDRLREAKEELERVLKRDHETLKEVVERI

SEQ ID NO: 17874 - protein, 56 aa, Artificial Sequence
  Synthetic
EEVLKKIIERTRDLVRRALRTMEESIKRTEELVKKLLDELEASIRKTEEDADRIRK

SEQ ID NO: 17875 - protein, 58 aa, Artificial Sequence
  Synthetic
SSLERLIEEDHETVRRVKKTLDDMLKRDHEVVDEARRRLDELLKRDTDIVRDAVKRIR

SEQ ID NO: 17876 - protein, 56 aa, Artificial Sequence
  Synthetic
EEVLKKIIKETKELAKEAVERLEESIKETEDLVRRVLKEMEESLRRTEELVREIER

SEQ ID NO: 17877 - protein, 56 aa, Artificial Sequence
  Synthetic
SIEEVIERIREEAERLLKELEEVNRESTRLAEDLREELRRVLENSRALVKELKERI

SEQ ID NO: 17878 - protein, 59 aa, Artificial Sequence
  Synthetic
DKSLKELLRDVERKIREVRKRLKESLERVEREIRRVREEIKRLNDESRERIERVKRRVD

SEQ ID NO: 17879 - protein, 59 aa, Artificial Sequence
  Synthetic
DAEELLRRLDKSSKETLKRNEESLRRSEETSKRSLDTNRRSLEKIEKIATDLRRKLSER

SEQ ID NO: 17880 - protein, 55 aa, Artificial Sequence
  Synthetic
ERVVREAEKLDEDNTRHSRRNLEESKRLDEENIKRSEDLLRDVRRLIEEVLEEAR

SEQ ID NO: 17881 - protein, 60 aa, Artificial Sequence
  Synthetic
SKLDEILERAKKLIDDLRKESDDVLRRDRELIERIRRKSEEVLERVKRLIEELEDRVRKV

SEQ ID NO: 17882 - protein, 60 aa, Artificial Sequence
  Synthetic
EDEVRRVLRELERLVKELKDKNKESLDELKKTNDRLEEENRESLRRAREEARRILEEIRR

SEQ ID NO: 17883 - protein, 60 aa, Artificial Sequence
  Synthetic
DELEEILKRVEKLIRDSIEKIRRILEEDRELIKELIKESREVLERVRELIKTLEKKVKDV

SEQ ID NO: 17884 - protein, 60 aa, Artificial Sequence
  Synthetic
RRTVEEVLKRIEELVKRSLEESDRVAKEVRKTNEEVKKTNEDSLRKIKELVKRILEKIRK

SEQ ID NO: 17885 - protein, 60 aa, Artificial Sequence
  Synthetic
DELEDVLREVRKLIKELEKKSREVLKRDKELIDRIRKESEEVLKRVEDVLRKLEDEVRKV

SEQ ID NO: 17886 - protein, 60 aa, Artificial Sequence
  Synthetic
KRRVDEVLEEIERRVTELNKKNEESLRRAEKTNKELDEENKESLERIRKLIEDILRKIEK

SEQ ID NO: 17887 - protein, 59 aa, Artificial Sequence
  Synthetic
DELERILEEVKRRIERLIERLREVLERDKKLIEDIRRESEDVLRRVEEVIKKIREELER

SEQ ID NO: 17888 - protein, 60 aa, Artificial Sequence
  Synthetic
RETVKDVLRKLRKIADEVRRDIERVLDEARKTNKRLDEENKDSLKKLRDRAKELLDEVRR

SEQ ID NO: 17889 - protein, 61 aa, Artificial Sequence
  Synthetic
RELEEVLKEAEKLIREITEEVKEALRRDEKTVRDNIRDLRRVLEEVRKLIEEILDRVRRRG

SEQ ID NO: 17890 - protein, 56 aa, Artificial Sequence
  Synthetic
SKFLERLEELITRLKERIDKALRDLEKTNDELRKRSEEVLRRLERLLERLREEIRR

SEQ ID NO: 17891 - protein, 56 aa, Artificial Sequence
  Synthetic
SEVERVLEDSRRTNEEIIKRLRDALRESEKTNRDIEKRLREMLKKSKETNERIKRS

SEQ ID NO: 17892 - protein, 56 aa, Artificial Sequence
  Synthetic
KKVLDKARELVRRTEEIVKDVIRKSRELVKESKERVDRVITESRRVVKKTLDDIRK

SEQ ID NO: 17893 - protein, 56 aa, Artificial Sequence
  Synthetic
SEIEEALKRSKETNERIIRKLEEVLRRSRKTNEEIIRRVERVLEDSERTNREIEKS

SEQ ID NO: 17894 - protein, 56 aa, Artificial Sequence
  Synthetic
EEFLRTVKKLVDDTRKAVEEVITRSRRLVEESERRVREVIDRMRKLVEETKRKLDK

SEQ ID NO: 17895 - protein, 56 aa, Artificial Sequence
  Synthetic
SEIEKALKESEDTNRKIKDDLRKVAERVRKLIEDVIRTLERVLRDSERTNREITRS

SEQ ID NO: 17896 - protein, 56 aa, Artificial Sequence
  Synthetic
EDVLRKAKRLVDETLKEVERVIRELEKLVEDLEETVKEVIKRSRELVDETEKRIRD

SEQ ID NO: 17897 - protein, 56 aa, Artificial Sequence
  Synthetic
EEIERALKKSEETNRDIIRKLREVNERDKRAVERDEEELKKALDESRKTNEDIRKS

SEQ ID NO: 17898 - protein, 56 aa, Artificial Sequence
  Synthetic
KDVLETVRKLVEDTLREVERVITHSLKRVEDTLRKAKEIADRMRTLVRKTLEDIER

SEQ ID NO: 17899 - protein, 56 aa, Artificial Sequence
  Synthetic
DEVERVLEKSKRTNEDIIRRLEEVNKTDRKLVEDDIRRLEKALRDARKTNEEIRTS

SEQ ID NO: 17900 - protein, 56 aa, Artificial Sequence
  Synthetic
EDVLRKVRELVERTKERVERVIDHSRKVVETTLREVERVIREIEELSKDSERKIRK

SEQ ID NO: 17901 - protein, 56 aa, Artificial Sequence
  Synthetic
SDAERALKESEDTNREIIEKLERVNKRDKDIVDKIREDLKRVLERVRDTNRRIRES

SEQ ID NO: 17902 - protein, 56 aa, Artificial Sequence
  Synthetic
ERVLREVKRLIDETKRIVDEVIKHSKEEIDKLREEVERVIKELRELSDKSLDDIRK

SEQ ID NO: 17903 - protein, 56 aa, Artificial Sequence
  Synthetic
KEIEDVLKKSEDTNRRIIERLRKANDTDRRLIEDTIRKLREVLKEAEKTNKDIKDS

SEQ ID NO: 17904 - protein, 56 aa, Artificial Sequence
  Synthetic
EDVLRTVEELIERTEREVERVIAHSEDLIRRSNEDVKRVIKTIRELSEDSKRAADK

SEQ ID NO: 17905 - protein, 56 aa, Artificial Sequence
  Synthetic
DEERVLKELEDLLREILKDIERTVRESRKLVKTILDEIEEVARHNRKLIEEIRREV

SEQ ID NO: 17906 - protein, 56 aa, Artificial Sequence
  Synthetic
LKELLETVRRVIEEVKKVLKRSLEESKKVIDDVRRHLEKNNRDIKTVIDRVREKAK

SEQ ID NO: 17907 - protein, 55 aa, Artificial Sequence
  Synthetic
SVEEVVEEVKRLIEEVEKTNKKTVEDSKRLIDDIRRRIEEVMRHNRELIKKIERE

SEQ ID NO: 17908 - protein, 56 aa, Artificial Sequence
  Synthetic
LRELLERVRRLVEESKRNAEESLRRSEKVIKEATDHLRRNNETIKRVIDRVREEAK

SEQ ID NO: 17909 - protein, 55 aa, Artificial Sequence
  Synthetic
DTERVLKTLRDLIDTILKRNEEILRHNEKLSRDSKRRIEEVARHNRDLARRVEEE

SEQ ID NO: 17910 - protein, 56 aa, Artificial Sequence
  Synthetic
LRKLLEDVKEIIKTSKENVDRNNDRIRRVVERSEKHLEDNNRDVKRVVDEVREEAR

SEQ ID NO: 17911 - protein, 59 aa, Artificial Sequence
  Synthetic
KEEEDIKREIEKRITEIKKKNEEVLRRVEELIKRIHELNKRIEDTIDEEIRRIEDLVRR

SEQ ID NO: 17912 - protein, 56 aa, Artificial Sequence
  Synthetic
DDVLRKLKRLLDEIIKHSEDVLRKIKELLDEIKRDSDRVFKKLKELLDRIAREIEK

SEQ ID NO: 17913 - protein, 60 aa, Artificial Sequence
  Synthetic
RELEEIDRKIKKLIEDIHRENRDILRRIRELIERIKKKNEDILREVRKLIKEIEDLVREG

SEQ ID NO: 17914 - protein, 56 aa, Artificial Sequence
  Synthetic
DKVLKKLEDLLREIKKDSDRVLEEARKLLEEIKRHSDEVLEEIKKLLDDIKKRVET

SEQ ID NO: 17915 - protein, 59 aa, Artificial Sequence
  Synthetic
SELEKIDDEIRKLIEDIHRLNREIARRNEKTIREIRKKNEDVLRRNKRSADEIDRLVKE

SEQ ID NO: 17916 - protein, 56 aa, Artificial Sequence
  Synthetic
SEALRKLKRLLEEIERDSRRVLDELHKTDEDIERHSREVEDRAHKTDKTIKDRVET

SEQ ID NO: 17917 - protein, 60 aa, Artificial Sequence
  Synthetic
SEDEKILEEVRREIERIHEENRKVRERIERLIREIHKLNREVLERNKESIEEIRRLVEEG

SEQ ID NO: 17918 - protein, 56 aa, Artificial Sequence
  Synthetic
SKFLEDIERLLREIDKDSKRVLEELKRLLDEIRKDSDRVLKTAHDTDDKILKDIDK

SEQ ID NO: 17919 - protein, 59 aa, Artificial Sequence
  Synthetic
KEEDEVREEIKRRIEEIARLNKEIEDEIRELIKRIHELNREILKKVRKLIEEIEDLVRK

SEQ ID NO: 17920 - protein, 56 aa, Artificial Sequence
  Synthetic
SEVLRELDELLRRIKKNSEDVARKLKDLLRRIREDSERVAKEIRRLVEEIKKKVDK

SEQ ID NO: 17921 - protein, 61 aa, Artificial Sequence
  Synthetic
DEVKRIVDEVRRLVEKVHRVNEEVVKESEDLVREVHRKNKRVLDESERLVEEVERVLKRDV

SEQ ID NO: 17922 - protein, 55 aa, Artificial Sequence
  Synthetic
ERVLRTAEEVIRRLEKHSKDLLDTSRRLAEEILRKSDDLLRRSKEKIDDLKRKIK

SEQ ID NO: 17923 - protein, 61 aa, Artificial Sequence
  Synthetic
SEVDRIKEEVRKLLEEHHKRNEDIVREVTRLLEEHHKKNEEVVRESEKLVKKIREILRDRV

SEQ ID NO: 17924 - protein, 55 aa, Artificial Sequence
  Synthetic
ERVLEEARKVVRELNRRSEELLKRARELVERLDRKSEELLRKSERIIKKIEEDIR

SEQ ID NO: 17925 - protein, 61 aa, Artificial Sequence
  Synthetic
KEVEEIVRDVRRLVEEHHRENRKIVETVEDLVRKVHRENKRVVEESERLVDELTKILRDTL

SEQ ID NO: 17926 - protein, 55 aa, Artificial Sequence
  Synthetic
EEVLKRVREAIRRLNEDSKRLLKEARDVVERIKRNSDKALEESKRKLKEIEERIK

SEQ ID NO: 17927 - protein, 61 aa, Artificial Sequence
  Synthetic
SKMEEVRRRIKEEADRDEEDNRRVLEDIRRLIEENKRRNEEVLKRIEKKARDLLERIKKDG

SEQ ID NO: 17928 - protein, 55 aa, Artificial Sequence
  Synthetic
EEIIKEVSTLNEKLKRDTDEILKEVTRLNERLKEETDRILEEVKKLIDKVRKAVE

SEQ ID NO: 17929 - protein, 61 aa, Artificial Sequence
  Synthetic
KEADDVKRRLDDLIRRNEEKIRDVRRRVKELVDRNRKKIKEVLDKVKEIIDRLKDEIDKTG

SEQ ID NO: 17930 - protein, 55 aa, Artificial Sequence
  Synthetic
ERIIEEVTRENDRLRKESDRVLDEVSKLNDEARKETDDVLKTVDELVREVAEKAK

SEQ ID NO: 17931 - protein, 61 aa, Artificial Sequence
  Synthetic
SDAERLLETVRRIAKRLKELNEEVLREAKRIIDRVREENERSRETIREIMKKLKEDIDRIG

SEQ ID NO: 17932 - protein, 56 aa, Artificial Sequence
  Synthetic
VDEILRDVERLLEEVRRSVKESTRRIKRLLDEVRKSVKESTKEIKKLLKDVEDAAR

SEQ ID NO: 17933 - protein, 61 aa, Artificial Sequence
  Synthetic
KDIEDLRRRIEEIIEEAKRLDKTSLELIRRIIKRIKDENKKMLDEAEKIIRDALKTIDDVG

SEQ ID NO: 17934 - protein, 56 aa, Artificial Sequence
  Synthetic
VEDVTRRIEELLEEVRKSSEDSIRDIRRLLKEVRDSFKRSSDELKRLLDEVRKRAE

SEQ ID NO: 17935 - protein, 63 aa, Artificial Sequence
  Synthetic
RELEEVVKELRRLLEEVRKRVEDSIKRLDELLDEVRRSNKKSSEDTRKLLKELEDEARKVMER

SEQ ID NO: 17936 - protein, 56 aa, Artificial Sequence
  Synthetic
VREVREEIERIVTKARKVVKEDDDLVKRIVAEARRLSKESEEKVREIVKRAEEKVR

SEQ ID NO: 17937 - protein, 55 aa, Artificial Sequence
  Synthetic
DEVEELREELERLLKESEDRLREVKKRSDDSLKESRELIKKVRDTLERLLREVED

SEQ ID NO: 17938 - protein, 56 aa, Artificial Sequence
  Synthetic
VETVAREVRERVERSKRHIEKVLKEDEEMVRESKKNIEDLLRRVKEDIDRLKEEVD

SEQ ID NO: 17939 - protein, 55 aa, Artificial Sequence
  Synthetic
SKADRLREELDRLLKEVKELNERSKRESDRSLEEIKRLIEKVERESEKTLREVRA

SEQ ID NO: 17940 - protein, 56 aa, Artificial Sequence
  Synthetic
IDTVVEEVKKLIKEILDHIRELVEDDKRKIKEILEEIKKLAEDDRRKVEEVKRKVD

SEQ ID NO: 17941 - protein, 57 aa, Artificial Sequence
  Synthetic
SDVEDLKKKLDELLEEVERTSREVRKTSERSLEEVEKLLRRVKEESKRLLEEVERDI

SEQ ID NO: 17942 - protein, 56 aa, Artificial Sequence
  Synthetic
VKKVLDDVKKLVDDVKRKDKKLLDDDRRRVEEALEHIKRNLDRSRDLIRRIKEKAK

SEQ ID NO: 17943 - protein, 57 aa, Artificial Sequence
  Synthetic
DEVKKLKDDLDRLLDEIRRKIEKVRKDSEDSLKRVEELIRRVEEESRRLLEDVKREI

SEQ ID NO: 17944 - protein, 56 aa, Artificial Sequence
  Synthetic
IKKVLDDVRREIRRIDEEIKRVEEEDRRMVTELLKHIERNLERSKRLADEVKEKAR

SEQ ID NO: 17945 - protein, 55 aa, Artificial Sequence
  Synthetic
KEVDELRKALKELLDEVRETSKRVLDETRRLLEEVRRELERVKRESDETLKRIKD

SEQ ID NO: 17946 - protein, 56 aa, Artificial Sequence
  Synthetic
VDTVLEDVKRKIDELKEHDKRNLDESRRLITELLERIKKLAEDDRRVIEEIERRIQ

SEQ ID NO: 17947 - protein, 60 aa, Artificial Sequence
  Synthetic
KTMDEIKKEVTDLVRRIRELNERVERTVEDLVRKSRRLNERVLREVERLVKEVRDALRDK

SEQ ID NO: 17948 - protein, 59 aa, Artificial Sequence
  Synthetic
DETLEKVVDDVRKRIKRSKEHSDEVLEDAKKKIDENLEHSRRVLEEAKKLIDDLKDEIR

SEQ ID NO: 17949 - protein, 60 aa, Artificial Sequence
  Synthetic
EKAERIIEEVTDLVRRVRETTKTVKEEVRKLVERSKRRNEEIRREVKELVDEVEKKLREK

SEQ ID NO: 17950 - protein, 59 aa, Artificial Sequence
  Synthetic
KDALEKVRRDVERLIRELEKTDRDVLEEVKKLIEESERNSDRILEEVRRIIEELKKKIK

SEQ ID NO: 17951 - protein, 60 aa, Artificial Sequence
  Synthetic
SVVDEIRERVERLLREVEKTTEELRDTVRKLVEESEELTKRIEDEVRKLVEKVRRELRRK

SEQ ID NO: 17952 - protein, 59 aa, Artificial Sequence
  Synthetic
EDKLREVLEEVKERIDRLKELDKKILEDVKRLVKESKEELKDILRRARKLIRDLEEKIK

SEQ ID NO: 17953 - protein, 60 aa, Artificial Sequence
  Synthetic
SEVEKMLKELKELVERALERDKDALRKLRDLVRESLERDKRMVDKLDELVKEIEDRIRKR

SEQ ID NO: 17954 - protein, 59 aa, Artificial Sequence
  Synthetic
REKVDKIRRDVKRLLDESRESLERSEKDVEKLLEDSRDSLRKSKKRVEELVKRVEEALK

SEQ ID NO: 17955 - protein, 60 aa, Artificial Sequence
  Synthetic
REVEEALKESTDTIKKILDDDRKAMDELKKLVDKSLEDDKRAVDRLRELVKEIKKIIKKR

SEQ ID NO: 17956 - protein, 59 aa, Artificial Sequence
  Synthetic
KEDVDRIEEESRRLNEESRDSLRKSEDTVRKLLEESKESLDRSRREVEKLLKEVEDALR

SEQ ID NO: 17957 - protein, 61 aa, Artificial Sequence
  Synthetic
SELEELDREVEELVERSKRTNERVVEESKRLVDESRRDIDRLLEEVRKLVKDILERIKEEG

SEQ ID NO: 17958 - protein, 59 aa, Artificial Sequence
  Synthetic
SEDVRRLLEKIERLIEESNRSLERSREESERLSKESEDRLRELEKTVKELLKRVEEALR

SEQ ID NO: 17959 - protein, 61 aa, Artificial Sequence
  Synthetic
DEIRELLKKAEELVERSLRDNEKVVDELKKLVDESLRRIREMLKRAEDEVRKILEDIERKG

SEQ ID NO: 17960 - protein, 59 aa, Artificial Sequence
  Synthetic
SDEVDTLRRTVDKLVKDSNRSLEESKRTLEDLIRRSKEELDKLEKDVRRLLDEVRKALK

SEQ ID NO: 17961 - protein, 60 aa, Artificial Sequence
  Synthetic
DELEDAMRRVEEMAERSERNIRRSIRKVEELVTRSKKNIEDSLREVEKVAREAEELLRRN

SEQ ID NO: 17962 - protein, 55 aa, Artificial Sequence
  Synthetic
EEVKRRLDELLKRVTDLDRDSEKKLRELLEEVTKLDKESKDRLDELLEKVRRDRE

SEQ ID NO: 17963 - protein, 61 aa, Artificial Sequence
  Synthetic
SEVDKLLDRLTKLAKRSIDEARRLVERDREVLEKSIRDAEKLVERDEKVLEDIKRLIEREG

SEQ ID NO: 17964 - protein, 55 aa, Artificial Sequence
  Synthetic
ETVRRLVTELNKASKKVVDDVRRESEKSNRDSEDVVRKVKKASDKSLEDVERDIR

SEQ ID NO: 17965 - protein, 61 aa, Artificial Sequence
  Synthetic
EEVERIVERLKRLAEEDSREIKEVMDRNRESVRRILKRIKDIVEELRRLVEEIKKKIEKDG

SEQ ID NO: 17966 - protein, 59 aa, Artificial Sequence
  Synthetic
KEKVERLEKDIRRLEKESEDALRRLEDTSKRTDDEIERAIEELERTITDLVREIRERVR

SEQ ID NO: 17967 - protein, 60 aa, Artificial Sequence
  Synthetic
REVDEIRKELDDRVREIKKRIEEAVEDSRRTVEEIKRRVEEVDKTDRKLVEDIKREIDRR

SEQ ID NO: 17968 - protein, 59 aa, Artificial Sequence
  Synthetic
RKKAEELRDRVRKLVEEIERLLEELRRTLEKTRREIERVVEENRRSVEELIREIKERVD

SEQ ID NO: 17969 - protein, 60 aa, Artificial Sequence
  Synthetic
DDERRVKEEIKRILTEAKKVIDENKRRSEEVLDRVRKLVKENKDENDEVLKTVDELVRRG

SEQ ID NO: 17970 - protein, 55 aa, Artificial Sequence
  Synthetic
EEVRKELKRVLDEVRRLVKETEETDRTSNRTVAELAKDLEKKTDDIEREVRKKVT

SEQ ID NO: 17971 - protein, 61 aa, Artificial Sequence
  Synthetic
DRVERILKKIEDALRKVEELIRRNKKKIDDVLDEVRRLVEESKKRIDEILDEVRDRITKLK

SEQ ID NO: 17972 - protein, 58 aa, Artificial Sequence
  Synthetic
KEAKRLKDLLDTVRETVKRLNDELRKRSEEVLRRVDKLNKESKKRLDEVLRTVREELR

SEQ ID NO: 17973 - protein, 60 aa, Artificial Sequence
  Synthetic
REIEEVKKENDKSLKEIEKIIREVKEENKRSLDKIKRIIERALEEIKRMLEKAKKLADEG

SEQ ID NO: 17974 - protein, 59 aa, Artificial Sequence
  Synthetic
DKFLTEVKRSFEKSVEDIKRLLKEVSESVKRSTDEIRRLLDEVRRAVEEVLRRIRELLR

SEQ ID NO: 17975 - protein, 57 aa, Artificial Sequence
  Synthetic
SLVEELRRVVEEVRKTLEELVKRLEDSVRRSAEEIRKLIEDAERSVRESERAVKETG

SEQ ID NO: 17976 - protein, 58 aa, Artificial Sequence
  Synthetic
KEIKELLEEIKEMLRRLKKKAEDIDRTNRELEKEVRELVERLLRDNRRLLKEVVERAK

SEQ ID NO: 17977 - protein, 57 aa, Artificial Sequence
  Synthetic
DKIEEAKKNVDESKRRVEELIRELRESVERSKRDVERLVRELEESVERSLETVKRDG

SEQ ID NO: 17978 - protein, 58 aa, Artificial Sequence
  Synthetic
KEVKELLKRNSDLLRRVEELVKKLDKENRDLLRKVREDAKKLLKENEDLLEKVKRDAR

SEQ ID NO: 17979 - protein, 57 aa, Artificial Sequence
  Synthetic
DEIEKAEKNVRDSRREVERVVKKLKESVDKSREEVERLVRELERSVEESRRLVEERG

SEQ ID NO: 17980 - protein, 58 aa, Artificial Sequence
  Synthetic
KEVDRLLERNSRLLEEVEERAKELDERNKKLLEEVRRRAEEVDKRNKDLLRTVDRRAR

SEQ ID NO: 17981 - protein, 57 aa, Artificial Sequence
  Synthetic
SLIEEARENVKDSKKKVKELVDRLRKSVEESRERVREVVRRLRESVDTSADAVRKAG

SEQ ID NO: 17982 - protein, 58 aa, Artificial Sequence
  Synthetic
EAVKRLLEENSKLLADVADEARKLNEENERLLREVEKKAKKLDDENRKLLEEVIETVR

SEQ ID NO: 17983 - protein, 57 aa, Artificial Sequence
  Synthetic
DEIEELKKNVEDSRREIDRLIKELKESVEKSRKDVEKVVKELRESVKDSLDKLEKTG

SEQ ID NO: 17984 - protein, 58 aa, Artificial Sequence
  Synthetic
KEIKELLKENSDLLERVREEAETLDRKNKELLERVKRKADRLNEENRRLLKEVIEKAR

SEQ ID NO: 17985 - protein, 60 aa, Artificial Sequence
  Synthetic
SEVEKLLRDLERLLEEIVKEAEDLDRENKERLKEIARKARELNEENKDLLRRVKELVDRN

SEQ ID NO: 17986 - protein, 59 aa, Artificial Sequence
  Synthetic
ERLVREVERVIREVRKRVEEVVRKVEESIKESEERVKELVKRVTDSLERSKKEVEDAIR

SEQ ID NO: 17987 - protein, 58 aa, Artificial Sequence
  Synthetic
SEVEELLKRLEDILRENERRARELNRKNKEVLKDNRRRAEEVNRRNKRMLDEAERLAE

SEQ ID NO: 17988 - protein, 59 aa, Artificial Sequence
  Synthetic
EKLVREVETKIEEVRRRSEELVKEVEKSLKESEDDSRRLVREIEESIRESEERIKRRVE

SEQ ID NO: 17989 - protein, 56 aa, Artificial Sequence
  Synthetic
DEVEEILEKSRRTLEENKRRAKEAVRRSRETLRESEERVKRVVEELRDRLRRIEEE

SEQ ID NO: 17990 - protein, 59 aa, Artificial Sequence
  Synthetic
EDALRKIKKVLDETETESRRTLEELRKVLEETHRRNEKLIRDLREVLKEIEEAVRRREK

SEQ ID NO: 17991 - protein, 56 aa, Artificial Sequence
  Synthetic
DEVEEALRRLEDLLRRNVEEAKEVVKDSERTLREDAERVKRVVEKSKRTLEAIEKR

SEQ ID NO: 17992 - protein, 59 aa, Artificial Sequence
  Synthetic
EEAVRRIEEVLKKIREDSKRTIDELRRVLERTEEETRRLIKELEDVLRRTEEEVKRRLK

SEQ ID NO: 17993 - protein, 61 aa, Artificial Sequence
  Synthetic
SEVEKVLEEIKRLLDRIKERVDETDRRNKELLKKIKDEVRRAVEEIRRLLEEIKKSADEKG

SEQ ID NO: 17994 - protein, 59 aa, Artificial Sequence
  Synthetic
EKLVREVEEVVTRVRKTIEDLVKKDNDSVRKSEERIKEVVKRIEEEVKRVLEDVDRLAK

SEQ ID NO: 17995 - protein, 57 aa, Artificial Sequence
  Synthetic
DEVRELLERNRRLLEEIKKTVKDLIRRNEELLKRIEDDAKRLIDRNEELLDELEKRL

SEQ ID NO: 17996 - protein, 59 aa, Artificial Sequence
  Synthetic
GEELEELRRVVEESDETIKRLLEEAKESVDRSLDRIRKLLEDVRRSVERSKKRIDEKRK

SEQ ID NO: 17997 - protein, 57 aa, Artificial Sequence
  Synthetic
DEVRKILKDIEDILREIEERVKRVIERNKRILEKIREDVKRVDDRNKKLLEELERKL

SEQ ID NO: 17998 - protein, 58 aa, Artificial Sequence
  Synthetic
DDLRRVEEVAKRIKDRIRELLDEIRRSVERSKRDVKRLLDELRRSVEESKRRIDEREK

SEQ ID NO: 17999 - protein, 57 aa, Artificial Sequence
  Synthetic
SEVDKLLRENEKLLEDIERTVKRMLERIKKLNDDVHREIRRIDEENRRLLDEIEKKV

SEQ ID NO: 18000 - protein, 59 aa, Artificial Sequence
  Synthetic
GRDLDRLRRVVEKSKKRIEELEREARKVAKDVKKNLEELLEEVKESVRESEKRIKETEK

SEQ ID NO: 18001 - protein, 60 aa, Artificial Sequence
  Synthetic
SLKERIEEELKKVKDTSDRLNEEVRRSVEDTRKRSEDLNEEVRRSVEESRRRVESLLKRI

SEQ ID NO: 18002 - protein, 59 aa, Artificial Sequence
  Synthetic
EEEVKKIIERIEEILERSERRNREIIKRDEEALKRSEERNREIIERDKEMLERLEREVR

SEQ ID NO: 18003 - protein, 60 aa, Artificial Sequence
  Synthetic
SLIETIKEVVKRVAETSKRLNDRVREELRKVEREVEELNREVERVLREVETAVDDLVKKI

SEQ ID NO: 18004 - protein, 59 aa, Artificial Sequence
  Synthetic
REEAEDIIRKIEEVLKKSKELNDRIIERIKKMLEDLRRHNEEIIEKIRRALKRLEDEAR

SEQ ID NO: 18005 - protein, 60 aa, Artificial Sequence
  Synthetic
SLKETIRELLKRVEEESRKLNEDVARSVRETKRRSDRLNEEVERSVRRSEEEVRRLLKRI

SEQ ID NO: 18006 - protein, 59 aa, Artificial Sequence
  Synthetic
KEKAEEIIRRIKEMLRRDEEENRRIIERDERALDKSRRLNEKIIEEDKKAMRDLEEEVK

SEQ ID NO: 18007 - protein, 60 aa, Artificial Sequence
  Synthetic
SEVEEIIKENRRTLERDRREVEKVIEENKRSLEEIERKVREIIKDNDRSAKEITELAKAG

SEQ ID NO: 18008 - protein, 59 aa, Artificial Sequence
  Synthetic
EELVDRLRKSLRDVREESKKLIDELRRSLEESDRRVKELIDRLRKSLDDSRKLVDDLRR

SEQ ID NO: 18009 - protein, 60 aa, Artificial Sequence
  Synthetic
SEVEEIIKDNERTLEEIRKRVEDVIREIRRLLERIERRVREAIKRNEESLRRIKELVERG

SEQ ID NO: 18010 - protein, 59 aa, Artificial Sequence
  Synthetic
DELVRTLRESLRRVAEEVKRLLKEVEDVAREVEDRVKKLIEDLRRSLEKSREDVERDSK

SEQ ID NO: 18011 - protein, 61 aa, Artificial Sequence
  Synthetic
DRVREIIKRLRDLLREIRTVVRKIIEDNRKSLEEIEEHNRRVIRELRELLKEIKETVEREG

SEQ ID NO: 18012 - protein, 59 aa, Artificial Sequence
  Synthetic
EEMIRTVKKVITEIAEEVKRLADEVRDSVRRSEEAVRRLTKETKEVVDDIVRRVRELIE

SEQ ID NO: 18013 - protein, 61 aa, Artificial Sequence
  Synthetic
KKVEEIIEELKKLLREIEEHNKRVIEENERSLEEIKRHNEEVIEELRELLERIEEVVKRKG

SEQ ID NO: 18014 - protein, 59 aa, Artificial Sequence
  Synthetic
EDMIRTVEDVVRRIERRVRELSRESEESIRRSTETVKKLTKDTRDVVRRILKTVRDRIK

SEQ ID NO: 18015 - protein, 64 aa, Artificial Sequence
  Synthetic
SLEERLREVLKDIERRVRELNETNKRVLDKSKTTVDELLKRLREVLEEIREEVRKLIEELARRG

SEQ ID NO: 18016 - protein, 59 aa, Artificial Sequence
  Synthetic
REMIEKVLRDLEELAKRIEDKNRETIKESEKTLEEIRRRVDRLLEELRRLLKEIAKEVK

SEQ ID NO: 18017 - protein, 64 aa, Artificial Sequence
  Synthetic
SLEETLEKVLRDITERSERLIRENEKNLRDVKREVEKLNERNRDVLKKIREKVRELIEELRRKG

SEQ ID NO: 18018 - protein, 59 aa, Artificial Sequence
  Synthetic
EEAIRKVLEELKKLLEEDERRAKRVSEESKELLDRLAEDNERTIRKLERLLEELERRTK

SEQ ID NO: 18019 - protein, 60 aa, Artificial Sequence
  Synthetic
SEVDKVLEELKKLLDDDRREVERLLRELRRLLDRDRREVEKSIRTLEKLLKEIEDIVRER

SEQ ID NO: 18020 - protein, 59 aa, Artificial Sequence
  Synthetic
KRALERVREVLERAEDESRKLSERIKKVLEDIERESKRLSEEDREVLKRIKEEVERLEK

SEQ ID NO: 18021 - protein, 60 aa, Artificial Sequence
  Synthetic
SEVDKVLEELKELLKRLEEDVKRSSKESEDLLRKDEEDVRRSIRELERLLEEIEERVRRR

SEQ ID NO: 18022 - protein, 59 aa, Artificial Sequence
  Synthetic
ERALREVRKVLEDIKKSVDELLKEDKDNLRETARESERLSREDKKVLERIEERVKELED

SEQ ID NO: 18023 - protein, 60 aa, Artificial Sequence
  Synthetic
SEVEKVIEELKKLADDDRRRVEKSLRELRKLLEELEKRVRDSLEKLKKLLKEIEDRVRRR

SEQ ID NO: 18024 - protein, 59 aa, Artificial Sequence
  Synthetic
EKLLREVRKVLREARETSRELSRADEKVLRDIRREVKRALDADKKVLDDIRERVKELEK

SEQ ID NO: 18025 - protein, 60 aa, Artificial Sequence
  Synthetic
DEVEKILKEIDDAVKDLKRKSDKSLTDDRRMVEELKKKSEESLREVEEMVRRLEDEASRT

SEQ ID NO: 18026 - protein, 59 aa, Artificial Sequence
  Synthetic
EKVVRRVRDILDKLRKTVERLVEENEDSARRTEETIRKLVKDNEDILRELRRLIEERRT

SEQ ID NO: 18027 - protein, 60 aa, Artificial Sequence
  Synthetic
SEVEEMLERLKELLRRIEKVVRDSLRRLKELMRRDEEEVRRSLRRLEELLKEIERVARER

SEQ ID NO: 18028 - protein, 59 aa, Artificial Sequence
  Synthetic
KKVLDEVKELLERIEETVRRLIEENERVLEEAEELSRKLSEDNEKVLEDARREAERLTK

SEQ ID NO: 18029 - protein, 60 aa, Artificial Sequence
  Synthetic
DEVEEVLKELEKLAREDEDRVRKSEKKLRELADKDREDVERSLRRLERLLEELKRVVEER

SEQ ID NO: 18030 - protein, 59 aa, Artificial Sequence
  Synthetic
KDMLERVERLLREAEKLSEKLSRDNEDLLRRARDLSRELSKENERLLEDIRRRVEEAIK

SEQ ID NO: 18031 - protein, 60 aa, Artificial Sequence
  Synthetic
REVEEVLERLKRLLDTLEREVRKSLEELKRLLDELRKESKKSLDELRKLAEELERVVRRL

SEQ ID NO: 18032 - protein, 59 aa, Artificial Sequence
  Synthetic
EKMLREVKRVLEEAERRVRELIEENKRLLKEIKEEVKKLIEENEKVLEEARRLAEELKK

SEQ ID NO: 18033 - protein, 60 aa, Artificial Sequence
  Synthetic
DEVREVLKKLEKLADELREEVRKSLEDLKRLLREDEERSKESLKDLERLAREIEEVVKKK

SEQ ID NO: 18034 - protein, 59 aa, Artificial Sequence
  Synthetic
EKALRDVEELLRRIEERVRRLIKENEDLLREIEKTSEKLSRDNKELLKEIEERVRRLRQ

SEQ ID NO: 18035 - protein, 60 aa, Artificial Sequence
  Synthetic
DEVEEALKTLEELMRRDKEEVDKSLEKLRRLLKEDEDRSRESLERLKRLAEELEEVVKKE

SEQ ID NO: 18036 - protein, 59 aa, Artificial Sequence
  Synthetic
RRVLERVKKLLEDARRLSERLSEENERVLEEAKRRSEELSKRNEDLLREIEKKMKEDTR

SEQ ID NO: 18037 - protein, 60 aa, Artificial Sequence
  Synthetic
SEVEKVLEELKKLADDLRRTSKRSEEELEKLARELEKRVRESEKRLRDLLRELEDVVRKK

SEQ ID NO: 18038 - protein, 59 aa, Artificial Sequence
  Synthetic
KDALKRVKELLDRIREEVEKLIRRNEKLLRDIEEKVRTLLERNERVLEEIKKKVDDDIK

SEQ ID NO: 18039 - protein, 60 aa, Artificial Sequence
  Synthetic
DEVREVLEELRRLMKELRDVSEKSLRDLRKLAEEDKDRVRKSLEKLRELLRTLEDVVRKR

SEQ ID NO: 18040 - protein, 59 aa, Artificial Sequence
  Synthetic
EKMLREVEDLLRRAEKEVRRLIEENKKLLKEAEETSRKLSKENEDVLRDIRRAVEELKR

SEQ ID NO: 18041 - protein, 60 aa, Artificial Sequence
  Synthetic
SEVEKALEDLERLAKELEKVSRESLRRLEKLLEDDRRRSKRSLEELEELLDRLRDTVRRR

SEQ ID NO: 18042 - protein, 59 aa, Artificial Sequence
  Synthetic
EKALREVRDLLRRIEERVKKLIEDNRKLLEDARRESERLSEENKRVLEKIEREVKKLED

SEQ ID NO: 18043 - protein, 60 aa, Artificial Sequence
  Synthetic
SRVEEVLKKLEDLLRRLEEVSERSLRELRELVKRLEDVVRRSEKKLKELADRIEEVVRRR

SEQ ID NO: 18044 - protein, 59 aa, Artificial Sequence
  Synthetic
KKALDDVRRLLEEIEKRVTELIERNRRLLEEAEDRVRKLLRDNEELLKRIEKLVRDLER

SEQ ID NO: 18045 - protein, 60 aa, Artificial Sequence
  Synthetic
SRVEEVARKLEDLLRELKRVSDESLKTLEKLMTDDERRVRESLDKLRELAREIDEVVRRR

SEQ ID NO: 18046 - protein, 59 aa, Artificial Sequence
  Synthetic
EDALREVRRLLERAEELVRELIKRNEDVLREAKRTSDELSERNRRLLERIKETVDRKRK

SEQ ID NO: 18047 - protein, 57 aa, Artificial Sequence
  Synthetic
REVEEILKRIEELLRRIKKLSEETLREIAKLLEDIKRLSEETLKSNKDLLKRVRDEL

SEQ ID NO: 18048 - protein, 59 aa, Artificial Sequence
  Synthetic
SRMLREIERIIKELKELVDKLLEDNERLIERLDREVKRLLEENEKSVREASREIDERRR

SEQ ID NO: 18049 - protein, 57 aa, Artificial Sequence
  Synthetic
DEVEELLRRIERLVEEARRLVEELLETNKKLLKDIEKLSRDTLKSNEELLREVKDRV

SEQ ID NO: 18050 - protein, 59 aa, Artificial Sequence
  Synthetic
SEMLRRLETIIREAERDLRRLLKEARDSVKKVSDEIKRLLEENKRSVDRVSREIKRVEK

SEQ ID NO: 18051 - protein, 59 aa, Artificial Sequence
  Synthetic
DEVEELLKEIRELIEEARRRIEELLKEDRDIVRRVTELSRRTLEKIKDLIRKIKDIADR

SEQ ID NO: 18052 - protein, 59 aa, Artificial Sequence
  Synthetic
SEMLRRLEELIKEIEDLVRKLLEELKRSVRETEERVRKLKEDNDELIKRIDELVKEREK

SEQ ID NO: 18053 - protein, 60 aa, Artificial Sequence
  Synthetic
SSLDDLRRLAEELLRTNKKLMEDLRRTNEKLIKEIEDVLRRIRESSKRIKEEVDKLTRDV

SEQ ID NO: 18054 - protein, 59 aa, Artificial Sequence
  Synthetic
RKVLERVKEAVDEVRRSVEESLRDAKRMDEETRKTVEDVRREVTKSVEDVKRRIDESRK

SEQ ID NO: 18055 - protein, 60 aa, Artificial Sequence
  Synthetic
DEVDEVVREVERLLEELRKENDKSVEEDKRLVDKLREEVKRILEEVRKLLEDLARKAKED

SEQ ID NO: 18056 - protein, 59 aa, Artificial Sequence
  Synthetic
KDVLRKLREVIKEVERIAEEVVRKNKDSADKSRKIIEDVVRALKKVVDDVRKIAEDLSR

SEQ ID NO: 18057 - protein, 61 aa, Artificial Sequence
  Synthetic
DEVEKAVRESEETVKDIRRRNDETVRRLRELAKRLKERNEESVRRLRDLLRRLDEEVARRG

SEQ ID NO: 18058 - protein, 59 aa, Artificial Sequence
  Synthetic
ERVLRDIRRVMEDSERIVKEVLDRNRKVAEDVRRIVEEVLRVNEDVLRKIEKRVRELKK

SEQ ID NO: 18059 - protein, 59 aa, Artificial Sequence
  Synthetic
SELEEIKKRVDRALEENNKLLKEIEERVRKSNRDNERLLKEIEDRVREVTERIKKVEEE

SEQ ID NO: 18060 - protein, 59 aa, Artificial Sequence
  Synthetic
EDVLKKIRDLAREVEENVRESERKIKKLAEDDNRSVAESLREIKRLADEVKRRVDEARK

SEQ ID NO: 18061 - protein, 60 aa, Artificial Sequence
  Synthetic
SELEEVRKRVKDVNRKNKELLDEIERTVRELLEDDRRLVDEAKKELDTLLRDIERLRREG

SEQ ID NO: 18062 - protein, 59 aa, Artificial Sequence
  Synthetic
EDALREIRRLLEEVRKSIEDSKRLIEELLRRLKKVTDESRKKVEDLLREVEREVREAKK

SEQ ID NO: 18063 - protein, 60 aa, Artificial Sequence
  Synthetic
RELEEIEKELKRMLDENRRLLERIEEEVRRLNEDNRRLLEEIEKTVEDLLEKIRKLSKEG

SEQ ID NO: 18064 - protein, 59 aa, Artificial Sequence
  Synthetic
REALKRIEELLREIEEVVKRSKTEIERLLRELEESVRRSDERIERLLKRVKDVVDEEER

SEQ ID NO: 18065 - protein, 60 aa, Artificial Sequence
  Synthetic
EKEKEITKTLEDLIRKNRKLLEEIERRVKEVLKRDRELLEEIERRVADMLRRIRDVLRKG

SEQ ID NO: 18066 - protein, 59 aa, Artificial Sequence
  Synthetic
REVLERIKRLLEKVEKVSTESAKRIEELLEEVKRVTDDSKRRVTELLREVERVVDEVRR

SEQ ID NO: 18067 - protein, 60 aa, Artificial Sequence
  Synthetic
DTLRELAKKAKELDDRNRKLLETVEELVRRVNEKNKDLLRRVRELARELLDRLRKLAREG

SEQ ID NO: 18068 - protein, 59 aa, Artificial Sequence
  Synthetic
EEVRRELERLVRKLEESVRKSRKDVEDLITELKKSVKESLKEIEDLVRRLREVVKEIER

SEQ ID NO: 18069 - protein, 61 aa, Artificial Sequence
  Synthetic
EEVDRILKESEDTIREIRDRVRKMLETSKKTVEEIKRRVDRALERDKKLVEDLRERVERTG

SEQ ID NO: 18070 - protein, 59 aa, Artificial Sequence
  Synthetic
KEAVEKMRRIVRESREVVARIREDIKRVLDESDKVVKDLKRAADRSVEEVKKVVDDIKK

SEQ ID NO: 18071 - protein, 60 aa, Artificial Sequence
  Synthetic
SELERLKETSKDTIKKIKDLLRELKKTVDDVIERDKTLLDDLREKVERVIRRIEELLKRT

SEQ ID NO: 18072 - protein, 59 aa, Artificial Sequence
  Synthetic
EKVRDEIRKLIETNKRVADRVEEEVRKLIEDSERSLRKSEKDVKELIKKVEEVMEEVRR

SEQ ID NO: 18073 - protein, 60 aa, Artificial Sequence
  Synthetic
SIEETVKRLIEEIERVLRDARRESKRLSEEDKKVLDEIREEVRKLEEKIKTVLDKARKDI

SEQ ID NO: 18074 - protein, 59 aa, Artificial Sequence
  Synthetic
EKLLDEVRRRVEEVIKELEELLRRDKERVDRSIRELEKLLEEIKERVDRMIKELEDRLR

SEQ ID NO: 18075 - protein, 60 aa, Artificial Sequence
  Synthetic
REVEEADKTVKELIKRNKELLDRIKKEVDELIRRDKELLDKAERDVDRLIKELRDVAREG

SEQ ID NO: 18076 - protein, 59 aa, Artificial Sequence
  Synthetic
KEVVDEIRRLLRELEKVSEDTKREIRELLKRAEESVRRVTERIERLLKELRDVIREIEK

SEQ ID NO: 18077 - protein, 60 aa, Artificial Sequence
  Synthetic
DELEKIKKDVKKMIRDNEDLLRRVEERVRELNRRNEELLKEIEKRVEELIKRLEDVARRG

SEQ ID NO: 18078 - protein, 59 aa, Artificial Sequence
  Synthetic
REVLEAIRRLEKEARDVSRRSTRKIEELLETSETSSEKSKRRIEELLRRLERVVEEARK

SEQ ID NO: 18079 - protein, 60 aa, Artificial Sequence
  Synthetic
EELERAAERIEELLRSNRDLADKITKLSRETLEKIKDLLRKIEKEVRELLERIKDLERRL

SEQ ID NO: 18080 - protein, 59 aa, Artificial Sequence
  Synthetic
EEVLRELERLLRELKKSVDELSRLIEELLRENKRLIDEVKKRIDELLEELKKLIEKVKK

SEQ ID NO: 18081 - protein, 60 aa, Artificial Sequence
  Synthetic
EIEKVVEEVIRRVRKVLEEVERSVRDTIERIKDVLRRVEEVVRRTDKTIRDVLDRIRKEI

SEQ ID NO: 18082 - protein, 56 aa, Artificial Sequence
  Synthetic
DEDIRRVLEDIRRELKRIVDENRKLAEEIIRTLERMVEKNKELMKEVVKKLEEDSR

SEQ ID NO: 18083 - protein, 60 aa, Artificial Sequence
  Synthetic
RIKETVDKVIEEVRRVLEEVRTTVKRTDERIKEVLEEVEETVRRTLEEIRRVLEELERAI

SEQ ID NO: 18084 - protein, 56 aa, Artificial Sequence
  Synthetic
DEDIRDLVRKIKEELRRIVEKNRELMEKVERELRRIVEENERLARRIKEELDRDMK

SEQ ID NO: 18085 - protein, 60 aa, Artificial Sequence
  Synthetic
RIEEIVERLIREVEKVLRDVERTVDKTDRKIREVLEEVRRISDESIKEVREVLEDLERKI

SEQ ID NO: 18086 - protein, 56 aa, Artificial Sequence
  Synthetic
DEDIRRLAEEIKKKLKRMVERNKELMERIEREIREIVERDKELVERIKRKLRELAR

SEQ ID NO: 18087 - protein, 60 aa, Artificial Sequence
  Synthetic
SIEDVVREVIKRVEDVLRRVEEVSRETIERVRRVLREVEERVERTDERIRRILDKLAKSI

SEQ ID NO: 18088 - protein, 56 aa, Artificial Sequence
  Synthetic
DEDIRRLVKKIEEDLTRIVERDKELLEDIERELRRMVEENERLLEEIERRARDEER

SEQ ID NO: 18089 - protein, 59 aa, Artificial Sequence
  Synthetic
EELERLARDVDKRVEDLKDDIRKIREEVKRLLDDNRRRAEEILEESRKSLETLTDLMRR

SEQ ID NO: 18090 - protein, 56 aa, Artificial Sequence
  Synthetic
SEIVKRVLEKLDEVLKDLKRTIDELKKRLEDVLRESRDIARRALEENERVLDELRK

SEQ ID NO: 18091 - protein, 59 aa, Artificial Sequence
  Synthetic
SEEDRIAEESRESLEKLKDDIRKIEDRVRKLLEDNKRRAEEILREVEEDLKRIEELFKQ

SEQ ID NO: 18092 - protein, 56 aa, Artificial Sequence
  Synthetic
SEIVRRLLEENKRVLDELEKRIEELLRRLDKVLKESERIAREAERKIEEVLRKLEK

SEQ ID NO: 18093 - protein, 60 aa, Artificial Sequence
  Synthetic
SAEEIIDRVTKEAKKSIDRTRDRITKLRRELEESIRRSRDIITKLLEELRRVVEEVKRDK

SEQ ID NO: 18094 - protein, 59 aa, Artificial Sequence
  Synthetic
EKVVEDLERKVEEIVREDEDLVRRLAEEVKRVVEDDERTAKKLEDDVRRIIEAVKRELK

SEQ ID NO: 18095 - protein, 56 aa, Artificial Sequence
  Synthetic
SLEELLEEARKTVERLIRESERVLRESEERVRRLIEELERVVRETRKRVKEVIERV

SEQ ID NO: 18096 - protein, 56 aa, Artificial Sequence
  Synthetic
EEELEKLLREIEERVKEMLKRDEDTLREIERKVKEAVRDSERTLEEIEKRVTEEKT

SEQ ID NO: 18097 - protein, 59 aa, Artificial Sequence
  Synthetic
SITEEIKDIERKVEKLIRELDEENKRILETLEREAKDVLRRIEDINEKLHRRARDLKRK

SEQ ID NO: 18098 - protein, 59 aa, Artificial Sequence
  Synthetic
EELKRVLDRVLKKVEDLLRKLEKSVRDSERRLEELLRELREVVKRVRDNIEKVLEELER

SEQ ID NO: 18099 - protein, 60 aa, Artificial Sequence
  Synthetic
SIREEAREELKRLEEEAERLDRENREILKELTREFKELLKESRDINREIHERIRKLKKDG

SEQ ID NO: 18100 - protein, 59 aa, Artificial Sequence
  Synthetic
RKLDKVLKEIEERLRELLKRLEDSVRESEKRLRDLLRELAKVDEEAKRNVEKVLKELED

SEQ ID NO: 18101 - protein, 59 aa, Artificial Sequence
  Synthetic
SIKDEIRKLLEKVKREVEEIDDRNRRLLEKVKREAEELLEKNRRLLEEVRKRAEELKDS

SEQ ID NO: 18102 - protein, 57 aa, Artificial Sequence
  Synthetic
LERVVRDVERRIEELIRKLERSVDRSEEEVRRLIEELRKSVEDSKREVDRVVEELRR

SEQ ID NO: 18103 - protein, 59 aa, Artificial Sequence
  Synthetic
SILEDVRRLLDEVKKLVEELLRENRRLLEEVKKEVEKLDRKNRELLREVRELVKELKDS

SEQ ID NO: 18104 - protein, 59 aa, Artificial Sequence
  Synthetic
RKLEEAVREVEERVRDLIRKARESVDESRKRIEDLIRELKKSVEESLRDIERLIKELRD

SEQ ID NO: 18105 - protein, 59 aa, Artificial Sequence
  Synthetic
STREDARRLVERVRKEVKRLLKKNSDLLREVTERVKTLNERNRRLLEEVEREAKRLKDS

SEQ ID NO: 18106 - protein, 57 aa, Artificial Sequence
  Synthetic
LERVVREIEKEIRDLIRELEENVKTSEKLIEDLIRELEKSVDESRKRVEELVKELRT

SEQ ID NO: 18107 - protein, 60 aa, Artificial Sequence
  Synthetic
SAEDVVREIEKTVRELMRRVEESVRKVEEDVKRLIKEVKDSADESEKKVERLLEEVKREK

SEQ ID NO: 18108 - protein, 56 aa, Artificial Sequence
  Synthetic
EEELRRLLEEIKKEVDKVIRENEETLKRIKEVVERVIEDNKRTLREIEEEVRRIRK

SEQ ID NO: 18109 - protein, 60 aa, Artificial Sequence
  Synthetic
SVEEVVKRILETIKDLMRRIKKNSEDVLETIKRLADEIRESVKRSNERIRELIKDIRETR

SEQ ID NO: 18110 - protein, 56 aa, Artificial Sequence
  Synthetic
TDELEKLLREVEEIVKDVSRKSDTSLKKAEERVRDVKRKDEKTLRDAEEVVRREKK

SEQ ID NO: 18111 - protein, 59 aa, Artificial Sequence
  Synthetic
SVEDLVRDVRDKAKRTSDEIRKLIERSKEIFERSSREIRRLIEESRDTARRVVEKLKKN

SEQ ID NO: 18112 - protein, 59 aa, Artificial Sequence
  Synthetic
EEEIARLVEEVKRLVKESLELIEELHRRSEKLVRDSLREIKTLNDESRKIVTDVLREVT

SEQ ID NO: 18113 - protein, 59 aa, Artificial Sequence
  Synthetic
KVEELVREVTEIARKVREDLERLVRESERRMRESSEKIKRLIEESRRRMKEVVEELKRE

SEQ ID NO: 18114 - protein, 59 aa, Artificial Sequence
  Synthetic
EEEIKRLREKVKRLVDKVKREIERLNRKSRELVKKSEEDIEKINRESRELLRKVLEDAK

SEQ ID NO: 18115 - protein, 59 aa, Artificial Sequence
  Synthetic
DVEELIKEVKDKAKRTSDEIKKLIDESKRVLDEVVRRLEELVKRIKESADRVLEEIARE

SEQ ID NO: 18116 - protein, 59 aa, Artificial Sequence
  Synthetic
RKIAKKLVDDVERRLRKSLRLIEELNKESRDIVRELLRLIEELLKEVEELVERLLREVK

SEQ ID NO: 18117 - protein, 59 aa, Artificial Sequence
  Synthetic
SELEKVLDEVRKRAKESLRRSEELAKRVEEMDERNLRNSKELRERVEEVIKRLLEVARQ

SEQ ID NO: 18118 - protein, 56 aa, Artificial Sequence
  Synthetic
SRVLEEVERIVKRVLDEDKKVLDRLRRSVERSSRESEKVLDELKKRVDRVLDEVRR

SEQ ID NO: 18119 - protein, 59 aa, Artificial Sequence
  Synthetic
SELEKVFEDVKRRLDESLEKSKELLKRVRDTDRENLKNSKRLLERNKRLVDDLLRVVEA

SEQ ID NO: 18120 - protein, 56 aa, Artificial Sequence
  Synthetic
SRLLEELEKRAKKVLDDDKRVLDEARRSSKRVTDEDRKVLKTAEDINREVSKRIRD

SEQ ID NO: 18121 - protein, 59 aa, Artificial Sequence
  Synthetic
SELEKVVDDVRRRLDRLLETSEKLLEDATKRLKDSERKSDEIVKTNEELLERLKTVLER

SEQ ID NO: 18122 - protein, 56 aa, Artificial Sequence
  Synthetic
SELLKRVEERIKRVLDESKKILKEIADEVRRVLERDKELLKRLEDKNREVSERIRK

SEQ ID NO: 18123 - protein, 59 aa, Artificial Sequence
  Synthetic
SELEKVVKEVADLLRRNLEKSKRVLEEVRRRLEENLRESEKVHDDNRKTARRILELVRE

SEQ ID NO: 18124 - protein, 56 aa, Artificial Sequence
  Synthetic
SRLLEELEERVRESIERSRRFIEELEKIVEETLTESEKLARASSEITKTVLDEIRK

SEQ ID NO: 18125 - protein, 59 aa, Artificial Sequence
  Synthetic
RELEEVFKEVEKELRDNLRKVEEVLREVRERLKENLDRSKEVLKDVRRRIKELLDLARG

SEQ ID NO: 18126 - protein, 56 aa, Artificial Sequence
  Synthetic
SKLLERLERKVEETLRRSREVIEDAKRIVEETLRRSEDIIREAKEIIDDVLEKIRR

SEQ ID NO: 18127 - protein, 60 aa, Artificial Sequence
  Synthetic
STDDALRKIERRHKELTKEVRDMLRKVDEEVKRLIEENEDVLRKLREEVDRVIKDIRRAD

SEQ ID NO: 18128 - protein, 56 aa, Artificial Sequence
  Synthetic
LEDLRRDSERIIEEVKRRLDELRREVEKVIDDVRRLSEKNEKDARRIIEEVKRRLD

SEQ ID NO: 18129 - protein, 60 aa, Artificial Sequence
  Synthetic
STEEVLDEIRKLHKTLTEDIKRVLREIEELHRRTIEENKEVLDKIREDYKRVIDDVRTKD

SEQ ID NO: 18130 - protein, 56 aa, Artificial Sequence
  Synthetic
AEELLRESKEAIKEVKRVLEELRKESKRVVDETRKLSEENLEHSERVLRKVEEDLR

SEQ ID NO: 18131 - protein, 60 aa, Artificial Sequence
  Synthetic
DEDKVLRKVKKLVEDIRREIERILREAERLHKELTRRNEEVLERIRRLVDKVIKEIRKAD

SEQ ID NO: 18132 - protein, 56 aa, Artificial Sequence
  Synthetic
LRELLERVERVIREVRRDLKRLLDESRDVVRRVEERSRRNLEEVKRDIERVKRELD

SEQ ID NO: 18133 - protein, 60 aa, Artificial Sequence
  Synthetic
SKEEVLREIERLHKETIRRIEEVLREATELHKRLTETNKRVLEDLEREAREVIEDVRRAD

SEQ ID NO: 18134 - protein, 56 aa, Artificial Sequence
  Synthetic
ARELLEESRREVERSEKEVERLLRKSRKVVEEVRKLSEENDREVKKILEEVKRRLD

SEQ ID NO: 18135 - protein, 60 aa, Artificial Sequence
  Synthetic
SKEEVLDEMRRLHETTKRDIRRVLKEIEELHERTLRENKRVLEEIKELVRRVIEDIKRKK

SEQ ID NO: 18136 - protein, 56 aa, Artificial Sequence
  Synthetic
LKELLDESRRVVKESKEDLDRLLKESRDVVDDTRRKSEKNLRDAERVIREAEEAVR

SEQ ID NO: 18137 - protein, 60 aa, Artificial Sequence
  Synthetic
DRERVLREMERLVRELLRENREVLDEIRKLHERTVRRNRELAKRLEEEAKEVIDRIEKTK

SEQ ID NO: 18138 - protein, 56 aa, Artificial Sequence
  Synthetic
VKKLLEEARDVIRRAKEKSKRNLDESRRVVKETDDLSEKNREDVRKIIKEVEEELK

SEQ ID NO: 18139 - protein, 60 aa, Artificial Sequence
  Synthetic
DVEEVLREIEELHRRTIERIKKVAKKVREDVKRVLDENKKVLDELRRRVEEVIEKIKKAD

SEQ ID NO: 18140 - protein, 56 aa, Artificial Sequence
  Synthetic
MRELKKRSDDVVRESEKELRRLEDEIRKVIEDLKKLSEDNEREVEKVIRKVEEDLR

SEQ ID NO: 18141 - protein, 60 aa, Artificial Sequence
  Synthetic
DMERIVDTLRKLNTDSNRRSKEAIDRLRKTNKDSLDKVEEVLREAERLAEDVLRKVEEKV

SEQ ID NO: 18142 - protein, 59 aa, Artificial Sequence
  Synthetic
KEVLKKLLEEVKDSNRRSEEDVRRMEEEVKRSNDELLKELKEILDKVREAIKKLEEKVK

SEQ ID NO: 18143 - protein, 60 aa, Artificial Sequence
  Synthetic
SAEDIIRRLRDLNRRSNKKSRDVAEKLRRDNKRTLEKVERKARELKKLAEEVVKEVRDKV

SEQ ID NO: 18144 - protein, 59 aa, Artificial Sequence
  Synthetic
EEVLRRMLKEVEDSNRDSDRDVRRIEEEVRRLNEELDKKLEDLEREVRRMIEEIRRKVK

SEQ ID NO: 18145 - protein, 61 aa, Artificial Sequence
  Synthetic
SELEEVKERVERVLKRIRDLTRELEDRVDKILEKSKRTLDELEKRVREVIARIKELVKRLK

SEQ ID NO: 18146 - protein, 56 aa, Artificial Sequence
  Synthetic
SEVLKRLEELAREVIEEDKRALERLDRKIRRVLDESRDVLRKIRKLIEDVLREVEK

SEQ ID NO: 18147 - protein, 61 aa, Artificial Sequence
  Synthetic
SESETIEKEADEMLKRSKKTLEELRKTVKRILERIEKLTRDLEKTAEDIIRKIEDDLRRLK

SEQ ID NO: 18148 - protein, 56 aa, Artificial Sequence
  Synthetic
SEVAKRISEKIRRVLEDSRRVLEELEDLIRRVLERDKRALERIKEDIDRIIRRVRT

SEQ ID NO: 18149 - protein, 61 aa, Artificial Sequence
  Synthetic
SELEAVLDELRKLVKELEDRLRKVNEESRRLIKELLDRLREVDERSRKLIKDLAEKARRRG

SEQ ID NO: 18150 - protein, 56 aa, Artificial Sequence
  Synthetic
TDELRKRVRDLVRRVDELIKRSKRHAEELTREVEEKVRESEEHVRRLVKEVEDRIR

SEQ ID NO: 18151 - protein, 56 aa, Artificial Sequence
  Synthetic
DEVEEADKRVEDEVRRLKRLVEEHTKRVEDKVRTLKKLVKEHTDEVRRAVEELKRR

SEQ ID NO: 18152 - protein, 55 aa, Artificial Sequence
  Synthetic
EDVLRKVKELLEDVARLVEESHEEARKLLKEVEDRLRESVREVEELLRDVERRTR

SEQ ID NO: 18153 - protein, 59 aa, Artificial Sequence
  Synthetic
DEVEKVKEEIRRIVKELEDRVEEHKKEAKKIIDELRRLVKRHREEVEEIVKKLEELVRR

SEQ ID NO: 18154 - protein, 55 aa, Artificial Sequence
  Synthetic
EEVLKEAEKLLEDVERKLRKSHEDLERLLKEVEEAVRDSNEEVRERLDRVREKMR

SEQ ID NO: 18155 - protein, 59 aa, Artificial Sequence
  Synthetic
DEDRKVEEDIRRIVKRLREIVEKHNREAREIIKRLRDEVRKHRDKARKIVTRLDELIKR

SEQ ID NO: 18156 - protein, 55 aa, Artificial Sequence
  Synthetic
KDVLKEAEELLEKVKRDLDRSHEELEELLKRVREELEDSNRELEKLIEEVERKVR

SEQ ID NO: 18157 - protein, 59 aa, Artificial Sequence
  Synthetic
SEVEDVDDRIRKIIKKLEDLVRKHNEDARRIIDELRELVERHNRRAREIVRELEDLVRR

SEQ ID NO: 18158 - protein, 55 aa, Artificial Sequence
  Synthetic
EEVLKKVEKLLKEVLDLMKESNEELEKLLEEVKREMEESVKELKKLLDEVREKVK

SEQ ID NO: 18159 - protein, 61 aa, Artificial Sequence
  Synthetic
KEIEDVLEKVRKVVTDLKKKLEDVNRESEKLVREVVKELKRVDDESRKLVERVEKEADEKG

SEQ ID NO: 18160 - protein, 56 aa, Artificial Sequence
  Synthetic
EEELDRRIKELKDRADKLIKDSKDNVEELRKKAEELIRRSRKNVEDLVRKATEDVR

SEQ ID NO: 18161 - protein, 61 aa, Artificial Sequence
  Synthetic
RELEEVLKKVEDLHRDVMKKIDDVVREASELHKKVKEDIDEVVKRAEDVLRRVKRELDKRG

SEQ ID NO: 18162 - protein, 56 aa, Artificial Sequence
  Synthetic
KDELDEHIERSLRKVTELVKDLKEHIERSLEEAKELVRRLEELIEELLRRLAEEVR

SEQ ID NO: 18163 - protein, 60 aa, Artificial Sequence
  Synthetic
SEVEEVLREAEELLKEVRDRLRESVEKSKRLLDEVRRKIEESHRRHKELSDEIRRLAEER

SEQ ID NO: 18164 - protein, 56 aa, Artificial Sequence
  Synthetic
IEELRKEIKKKIDEMRRLVKEDTERLERVAEELRRRVEEDKERSKDVVRRLREDVK

SEQ ID NO: 18165 - protein, 60 aa, Artificial Sequence
  Synthetic
SEVEEVLKRAEELLDDVRRLLERSHRETERLLDEVRKRVEDSHREHRKLSDEVRRKAEER

SEQ ID NO: 18166 - protein, 56 aa, Artificial Sequence
  Synthetic
IEELRKDIERAVKELRERVEENTRRVEELVRRLRELVEEDRKRSKEVADEMDERVR

SEQ ID NO: 18167 - protein, 60 aa, Artificial Sequence
  Synthetic
KEVEEVLDTAKKLLDEVRRELERSHEEHKRLSDEIRERLERSHEETERLLKEVKEEVDDK

SEQ ID NO: 18168 - protein, 56 aa, Artificial Sequence
  Synthetic
IEELKRRIDDMVRRLRELVERDRRESKKVADDLRRLVKENTERAREKIEELRKDVE

SEQ ID NO: 18169 - protein, 60 aa, Artificial Sequence
  Synthetic
SEIEEVLKEAEKLLREVEKELRRSHEELKRLLKEVRDKVRRSMEESERLLEEIKKKADER

SEQ ID NO: 18170 - protein, 56 aa, Artificial Sequence
  Synthetic
IEELKRRIEDAARKLEKLVKDDRERIERKVRELERLVEEDKKRLRDRVRKMDEDVR

SEQ ID NO: 18171 - protein, 60 aa, Artificial Sequence
  Synthetic
REVEEIVKKVRKEVTRLLREVEEDMKRNRDTIRELLKYVKKDLEENKDIIRRLLELIRRD

SEQ ID NO: 18172 - protein, 55 aa, Artificial Sequence
  Synthetic
EEARKDIERLLEEVRTKLRENEEDLRRLVKEVDRELKRNRDELERLAKEVRDELK

SEQ ID NO: 18173 - protein, 61 aa, Artificial Sequence
  Synthetic
SEAEEIAKEVEKRIRELLDRVRRMVEESEKYARDSLRKIKRLLDEVRRRIEELLRKIRRDG

SEQ ID NO: 18174 - protein, 55 aa, Artificial Sequence
  Synthetic
SEVAKKVKELLDEVERILREWEKEDRRLLKESEDLLREVEKEVRKLLRRVEEELK

SEQ ID NO: 18175 - protein, 61 aa, Artificial Sequence
  Synthetic
SESEKILEEAKRRIRKLLEDVKEMVKRSRDYARESLKRIKDLVEESKREIDKLLEEIKRSG

SEQ ID NO: 18176 - protein, 55 aa, Artificial Sequence
  Synthetic
SEVEEDLKRLLEEVKRELKRWEEDDKRLLDDSERALKEWEDTDRRLLKRVEDELR

SEQ ID NO: 18177 - protein, 61 aa, Artificial Sequence
  Synthetic
SEVEEIVKDAERYIKESLDRIRKAVEESRRRITELLKEVERLLREVRKRIKELLDEIRRDG

SEQ ID NO: 18178 - protein, 54 aa, Artificial Sequence
  Synthetic
DAERKLEELLEESRELLKRWRDDDKRLVDDVRRKLKEVEEEVRKLLKEVEDELR

SEQ ID NO: 18179 - protein, 61 aa, Artificial Sequence
  Synthetic
SEVEEIVKEAKRRIDELLKKVDELLKESERYARKSLKDNKDMVRRSEERIRELLEKIKRDG

SEQ ID NO: 18180 - protein, 55 aa, Artificial Sequence
  Synthetic
SEAEKRLKDLLDRVKEKLDEVRRRDRELLEESKDLSRRWKERDDRLLEEVEKALK

SEQ ID NO: 18181 - protein, 57 aa, Artificial Sequence
  Synthetic
REIEKIREDLERLLEEVKRAAEEWRRRDEELVRKLEELIKRVLDEDRRLLRELRDKG

SEQ ID NO: 18182 - protein, 59 aa, Artificial Sequence
  Synthetic
REVIKKVLEEIRDKIRKILKTIEDLVRKSEDLIRRVLEEIERILDESRRDVEEVKRREE

SEQ ID NO: 18183 - protein, 56 aa, Artificial Sequence
  Synthetic
DEDRRVKTEIKKLLEELTRRSREVEEDDRRLLDELTRETERIEEDLRRLLEEVRRS

SEQ ID NO: 18184 - protein, 55 aa, Artificial Sequence
  Synthetic
DEIEREVRKVEEDYRRSLRRVLEESRKIAERYKKKLDEMREEVRRRAKKVKDEVR

SEQ ID NO: 18185 - protein, 56 aa, Artificial Sequence
  Synthetic
KSVEKIVEDIKRVADKILEDIKRSEDRVREIVDRHRREIDKVVKEIVKRVEDLKRN

SEQ ID NO: 18186 - protein, 59 aa, Artificial Sequence
  Synthetic
KDEMEDLKRRVDELKKEIERALKEHKDKVKKLLDDLRRLNEELRREVRRVLEEVRETTR

SEQ ID NO: 18187 - protein, 63 aa, Artificial Sequence
  Synthetic
DEIERVEEALKKVEKDLRRLIRELEKLNDKIERDIRRLHEETNKRLKEVREKVEDMIRRVSAR

SEQ ID NO: 18188 - protein, 59 aa, Artificial Sequence
  Synthetic
RRVVKKLLDEIEEILRRLKKLVDDHARESKRILRESERKVEALLEEIEEILKRLEEKVK

SEQ ID NO: 18189 - protein, 60 aa, Artificial Sequence
  Synthetic
DEIERVLREIDELRKKVEKVIEDSRRNAKRWLDRVKRTAEELNKLSDELLEEVTRLAEAG

SEQ ID NO: 18190 - protein, 59 aa, Artificial Sequence
  Synthetic
SRAMEEVRKTAEEVIKTVDKLLKELRKTYEDILRDIDRLLKEHHARNRRVLEEVERLTQ

SEQ ID NO: 18191 - protein, 56 aa, Artificial Sequence
  Synthetic
SEREEVKKRLDDVRREAKRLLDEVRKRLEESHRKHKKLLDEVRKRLKEVEEEAKRR

SEQ ID NO: 18192 - protein, 56 aa, Artificial Sequence
  Synthetic
KEKVTKIIEDLKRELEEMFRKLKRLVEEDDRRSKESLEEVRKLVEDARRKIEEDTR

SEQ ID NO: 18193 - protein, 60 aa, Artificial Sequence
  Synthetic
SSIEKLKKVVEDIKRRSEDLNRELEKVVRDVKKRSEELNEELRKVSEEIERRLRELLKRI

SEQ ID NO: 18194 - protein, 55 aa, Artificial Sequence
  Synthetic
ERFVEELRRALKKDEDDMRRVVEDIERLLEEDERRMKKAVEDHRRLLEELEERAK

SEQ ID NO: 18195 - protein, 56 aa, Artificial Sequence
  Synthetic
DESEELKKVLKEIEDEVRRLIREIERVLEEIERRDRELLKRDEETLKRIEEEVRKL

SEQ ID NO: 18196 - protein, 55 aa, Artificial Sequence
  Synthetic
EEIIEELRRILKEAEDVIRRIIEEVRDVLRESEKRVRESIDENRKILEELRRRAK

SEQ ID NO: 18197 - protein, 56 aa, Artificial Sequence
  Synthetic
DEEDRLRRELEKVRRDADRLLEEIRRVLEEVERRSKELLKRDEDSLREIVRTVTEE

SEQ ID NO: 18198 - protein, 55 aa, Artificial Sequence
  Synthetic
DEVLEEIRRILEELRKEAEDIIRRIRELLRELEKNVTDSIRRNEEMLKELRRKVK

SEQ ID NO: 18199 - protein, 59 aa, Artificial Sequence
  Synthetic
SEAEKILEDMKRYIEEHIERVKRSLEENKKKDRELIEKSRKSLEDARKKIRELLELVRQ

SEQ ID NO: 18200 - protein, 56 aa, Artificial Sequence
  Synthetic
EEILKRIRDLVKELEERDRRVIEEMKKSNKRTEDTDREVLERIRRLVERLADEARK

SEQ ID NO: 18201 - protein, 60 aa, Artificial Sequence
  Synthetic
SELERVIEEIKRLLERLKRENEEVKKRVKKLLDELRKINKDVEDTVRELLKRVKELVDRA

SEQ ID NO: 18202 - protein, 59 aa, Artificial Sequence
  Synthetic
KDEIEEALRRVEEHIKRHLKTVKELAEKAERHIREHLKEVKRMLEKAKRTIDELLKKIK

SEQ ID NO: 18203 - protein, 57 aa, Artificial Sequence
  Synthetic
SLREAAKEVLERVRREVEKLRKSNEEVLTRVREEVKKLLETNKDVLRRVAEILKTAN

SEQ ID NO: 18204 - protein, 55 aa, Artificial Sequence
  Synthetic
EEDIREIEDILRKIAETVETLNRRLEDILREIRKSSKKTIDELREKAKELEDRTR

SEQ ID NO: 18205 - protein, 61 aa, Artificial Sequence
  Synthetic
SEVDEDLKDIKRYLDEHRKRVEEVVKRLEDRSRETAREVEEDVKRIERKVEEAKKEADERG

SEQ ID NO: 18206 - protein, 59 aa, Artificial Sequence
  Synthetic
EDAKRRIEEVLERVRRELERSEEKLRRVLEKHREDNDRLEEELDRVLRELEKILDEVAT

SEQ ID NO: 18207 - protein, 60 aa, Artificial Sequence
  Synthetic
DEVRKILKELKELVKRIEDKLRKYLEDVRREVERIEEEVRRNLERIKRLAEEIERRVRRD

SEQ ID NO: 18208 - protein, 59 aa, Artificial Sequence
  Synthetic
EDVKRKIDKVLDEVRRLLEDIKRRVEKINTDTERLLKKLAEDSKRALEEVKETLERAER

SEQ ID NO: 18209 - protein, 60 aa, Artificial Sequence
  Synthetic
ELRERIKRALDEHRRVSEELERRVREANKRHNEVSKEVKDDLKRSHDELRESLERIKRRG

SEQ ID NO: 18210 - protein, 55 aa, Artificial Sequence
  Synthetic
EEDLKRIREETERLKEDVRRYLRELEKLSRDLRRKVEELLKDNKRKVKEIEDEAK

SEQ ID NO: 18211 - protein, 60 aa, Artificial Sequence
  Synthetic
DELETLEERIRRSVERVRRELKRYKEEMDKHSEDLKRLVDKNLEDVRRELEEIRKLATDG

SEQ ID NO: 18212 - protein, 59 aa, Artificial Sequence
  Synthetic
EDMEKKLRELLERHERENKKAREDVEEANRRNEEVLKDIERRSKKALDDVRRELERVRK

SEQ ID NO: 18213 - protein, 61 aa, Artificial Sequence
  Synthetic
SLKEVLDKIEEDHRRMSKRNEEVLEEVKRRAEKLLKDAEEVLRRVRERIEELIRRVEETKG

SEQ ID NO: 18214 - protein, 56 aa, Artificial Sequence
  Synthetic
VKELKKRADESRKTVERLSRELKKELRKVEEDVKREVEKIEEDLKRIARRVREESR

SEQ ID NO: 18215 - protein, 60 aa, Artificial Sequence
  Synthetic
SELERLLEEVERLLEKLERDNKRLLDDVRRLLERLRRDNERLLEKNKRLLDRLREEVSRV

SEQ ID NO: 18216 - protein, 56 aa, Artificial Sequence
  Synthetic
IEKLAREVKRHIERHKEELDRLRKEVEKNARKHEEDLRRLEERSKKHVEDIERETR

SEQ ID NO: 18217 - protein, 60 aa, Artificial Sequence
  Synthetic
SELEKLLEDVKRLLDELRERNEKVLEDARRLLEELRKRNEDLLRRNRELLERLEREVSKV

SEQ ID NO: 18218 - protein, 56 aa, Artificial Sequence
  Synthetic
IDRVRRRVERHIREHERDLREVKKRIEEDAKRHRDRLKKLEEDSREHVKRMEDRTR

SEQ ID NO: 18219 - protein, 60 aa, Artificial Sequence
  Synthetic
KLEELAKELRRLLEELRKRSKEVIDRLRRLNEELRKTSEEVIRRLRELNRRLTEKARRRL

SEQ ID NO: 18220 - protein, 55 aa, Artificial Sequence
  Synthetic
EEVLRKVREEVKEHERRLEDALRRSKKEIDDHKRELEELLKENAEEVRRVEERIR

SEQ ID NO: 18221 - protein, 60 aa, Artificial Sequence
  Synthetic
KAEELVRELKRLLDKLREESKKVIEELKRRLDEVAKKSEDVVEEMRRLLEELKEKIERRL

SEQ ID NO: 18222 - protein, 55 aa, Artificial Sequence
  Synthetic
EEVLRDVRRKVEDHRRKLDEIRKRVTDEARRHERELEKALEKIRRDIRRIEEELR

SEQ ID NO: 18223 - protein, 60 aa, Artificial Sequence
  Synthetic
KVEDLLREAKALLDELKRESERIIKELRKLNDDLTKKSEEVIRELEKLLRDLKKIVDERL

SEQ ID NO: 18224 - protein, 55 aa, Artificial Sequence
  Synthetic
EEALKKVRKEVEDHKRRLKEAVDRNRKKIKDHEEELERTLRDIRRKIDKERRELE

SEQ ID NO: 18225 - protein, 59 aa, Artificial Sequence
  Synthetic
EELERLLKRVRDESKKNRDKVREDLERSRRKSKRHEDELRRLLKEARDDIDRVRDLRRK

SEQ ID NO: 18226 - protein, 56 aa, Artificial Sequence
  Synthetic
EEVVKEAEKILDDNRKENERVSEEDKELLERNKKKAEDVLRELEELIRKLAEELKK

SEQ ID NO: 18227 - protein, 60 aa, Artificial Sequence
  Synthetic
SELEELLKRIRDKSKENEDEVRTDLKRVRDYARRHEERLRELLERVRDELRKAEELRRAG

SEQ ID NO: 18228 - protein, 56 aa, Artificial Sequence
  Synthetic
ERVLEEIERIMRENKRRNEEVIKEIKELIDRLRRKSERVIEEIKKRIDELRDKARR

SEQ ID NO: 18229 - protein, 61 aa, Artificial Sequence
  Synthetic
EEEREIEERLRKKIEEIRREDKRHHDEVRRKVKEIKEEDREHHERVKRKAEEVKKRIETTG

SEQ ID NO: 18230 - protein, 55 aa, Artificial Sequence
  Synthetic
KDVLRELKRLLDELRESARKNNEDLKRLLEELEESVKRNNDELKKLLDELKERAR

SEQ ID NO: 18231 - protein, 61 aa, Artificial Sequence
  Synthetic
RELEELAERVKRLLERDEELLRRLKDAVRRLSEKDRRLLERLAREVKRLLDELRDLVRKRL

SEQ ID NO: 18232 - protein, 59 aa, Artificial Sequence
  Synthetic
KELLERVITELERKARESEKKHEDSLRELERLARESEERHKRSLEEVERKIEEIKRDLD

SEQ ID NO: 18233 - protein, 60 aa, Artificial Sequence
  Synthetic
RELEKLEDEIRRELRRIEKELKDYERELEERADKDRRDIEDYRRRLEERVKEIEDRLRRD

SEQ ID NO: 18234 - protein, 55 aa, Artificial Sequence
  Synthetic
EELRKILEDALKRVREEVKRILDRNRELLRESEELVRRVLKRNRDLLREVDERVR

SEQ ID NO: 18235 - protein, 61 aa, Artificial Sequence
  Synthetic
DKVREALKRLKDKMETYERRSKKHIEDHKRKLKEYEERVRRNIKRLREELKKLEEDAKTRG

SEQ ID NO: 18236 - protein, 59 aa, Artificial Sequence
  Synthetic
EELLKRVDELARRIMKRIKELNRENERVVRESLKRVDELNKRSEKVHKEVLDRLEELRR

SEQ ID NO: 18237 - protein, 57 aa, Artificial Sequence
  Synthetic
SLKEELEKLVRDIIRDNRRLLEENEELVRRSEESNKRLLEENEETARRIKAELERAG

SEQ ID NO: 18238 - protein, 59 aa, Artificial Sequence
  Synthetic
EKLVEEVKRKLKRKLEEIRREHRRTKEEIKKTNEDIKRRHDETLRRLEKTLEDIKERTR

SEQ ID NO: 18239 - protein, 60 aa, Artificial Sequence
  Synthetic
SEVEKILEELKREVREHERRVEKLVRELEDYVRRHREKVKRIEERLRDKLREIEELVKEG

SEQ ID NO: 18240 - protein, 59 aa, Artificial Sequence
  Synthetic
EKAVREIETLADEIRERIERSLKRIRDLIREIKEDLRRSLERIREIIREIKKAIDDRRK

SEQ ID NO: 18241 - protein, 60 aa, Artificial Sequence
  Synthetic
SEVEKILKEIRDENERLKKEIEEILRELERKLREHRREVEEVLKRIREKIETLKDESRRE

SEQ ID NO: 18242 - protein, 59 aa, Artificial Sequence
  Synthetic
EEMLREMERISREDRETLKRLTDRIREMIRRLEEEIKRSEREAREIIKEAKKVLEDEAT

SEQ ID NO: 18243 - protein, 61 aa, Artificial Sequence
  Synthetic
SRVEELIKDLRRSTKELEDRVRKLLEELKDKTRRTEKRNREKLEKLKEELRKLEEDVKREG

SEQ ID NO: 18244 - protein, 55 aa, Artificial Sequence
  Synthetic
EKVRKVMEDDRRKLKKILDDVEDVLRKHKKVLEDLKRTNDDVLREARKLAEKIRR

SEQ ID NO: 18245 - protein, 60 aa, Artificial Sequence
  Synthetic
SAEERLKEALKRLDDVSKRSEEEIRRMIKRIERISRESLKRLKDLNRRIKELVERIERRL

SEQ ID NO: 18246 - protein, 55 aa, Artificial Sequence
  Synthetic
ERLLEEIKRYIDEHKRRLDELRKDIERYLEEHKERLRELEKRHEELLRTLDREAK

SEQ ID NO: 18247 - protein, 61 aa, Artificial Sequence
  Synthetic
SAEEDLDRMRKKVEDVIREDKERVRKLLERAKEVIRESEKKHEDLRRRIRKVIKEIRERTN

SEQ ID NO: 18248 - protein, 59 aa, Artificial Sequence
  Synthetic
DTDLERELRRIDKHLRDHKDEARKSEERVEDHLRRHRERVRRNEEDVEDKLKKLKDETK

SEQ ID NO: 18249 - protein, 59 aa, Artificial Sequence
  Synthetic
REEEELKRRNKDHNRRHREDTKRIAEDVDRKLREWKKKSDEAREEVKRLLERLKELADR

SEQ ID NO: 18250 - protein, 55 aa, Artificial Sequence
  Synthetic
EDLRRLMKENRETIRESAEILERLRERVEDLVRRDREILEKLLRDIEELAERIKR

SEQ ID NO: 18251 - protein, 60 aa, Artificial Sequence
  Synthetic
SVEDELRKLEERLKRIADELRRLVEKNIEDNKESLKEIEKLIRENIERNKEVLKRIAERG

SEQ ID NO: 18252 - protein, 59 aa, Artificial Sequence
  Synthetic
KDELKKALDDVDKKLEDLRREVEDRDRKNEEDNRRLRKELEERSRENKEFLDKLAREAD

SEQ ID NO: 18253 - protein, 61 aa, Artificial Sequence
  Synthetic
SEKDESARDIEEKLERHLRKSDESRRRNEKRIKEHRDRSDESRKKFETDLKRIEDEVRKRG

SEQ ID NO: 18254 - protein, 55 aa, Artificial Sequence
  Synthetic
EKLKDLERKVREVIDRDRDILRRLEEEHRKVITEDEEILKRLEEKAREAIERIRR

SEQ ID NO: 18255 - protein, 61 aa, Artificial Sequence
  Synthetic
SEKDERLEEIKRRLKEHKRRSEEAVKDNDRKLEKHKRDSDRSAEEVKKKLEEIEKRVRKDG

SEQ ID NO: 18256 - protein, 55 aa, Artificial Sequence
  Synthetic
KKLDDLEREIRKVIEESKRLLEELERRHRRVIEEDKRILDELRRLIEELIEDAKR

SEQ ID NO: 18257 - protein, 61 aa, Artificial Sequence
  Synthetic
SEKDEELKRIKEDLERHERESEDDVRRNEEKIRRHRRKTEEAVKEVEEELKRLEEDVRREG

SEQ ID NO: 18258 - protein, 55 aa, Artificial Sequence
  Synthetic
RDLERLRKEIREVIEKSKDLLRELRRRHEKVIEDSEDILRKLEKKIKDLVDKIRK

SEQ ID NO: 18259 - protein, 61 aa, Artificial Sequence
  Synthetic
SRKDEEVKRVKEKLKKHEERSRDMVRKVEDKSRRHREKIKEAEREVRRRIEELEEDVRRRG

SEQ ID NO: 18260 - protein, 55 aa, Artificial Sequence
  Synthetic
KKLEDLREEAERVIRRSEKLLEELREHVERNIDEVREILRELAELVKRVIDEIRR

SEQ ID NO: 18261 - protein, 60 aa, Artificial Sequence
  Synthetic
SVEDILRTLRRLLEELEEESERILKRLREIIETNVRRVKELLRRLKERLDELAERLKAKV

SEQ ID NO: 18262 - protein, 59 aa, Artificial Sequence
  Synthetic
SKELDDLLKKVEEHLRRHKRKLEKALKDVEDESREHEKELRRALKRIERLLRELERKAD

SEQ ID NO: 18263 - protein, 60 aa, Artificial Sequence
  Synthetic
DEEEVIREIEKRFRDLIRRAEDVLRRIAEKMKRLKDKTRRLLEELRESNRKLIKELRDRI

SEQ ID NO: 18264 - protein, 56 aa, Artificial Sequence
  Synthetic
SKEVRDRVEEELKRIEDRLRKLDTDVDRYLKEHEDRLRKLKEDNERDLKRVEERAR

SEQ ID NO: 18265 - protein, 56 aa, Artificial Sequence
  Synthetic
DIEELLKEVKKEVDRVEKKVKELIDRNKERVDRVREENERVADEVRKLIKELRDRI

SEQ ID NO: 18266 - protein, 59 aa, Artificial Sequence
  Synthetic
RELVEKVAREAREKLKKVEDLLRKISRRSEELLRRNREATKKILKELRELLRRVEEKRR

SEQ ID NO: 18267 - protein, 59 aa, Artificial Sequence
  Synthetic
SEAEEALKRHRKLNKEAEKRAKDATDDSKRLLDEIRKRAKEASEDSKRLLDEARRLREA

SEQ ID NO: 18268 - protein, 60 aa, Artificial Sequence
  Synthetic
KERVRRILEEAKKTARELRERIKKLLKENEDAAKKLRDEIDEAAKKNKKAADEAREEARR

SEQ ID NO: 18269 - protein, 59 aa, Artificial Sequence
  Synthetic
SELEKVLEEHRRLNDEIRKELEDVTRKSEETNKRIEEDLRRVTKEAKDLLERIKEKLEA

SEQ ID NO: 18270 - protein, 60 aa, Artificial Sequence
  Synthetic
RRRVEEILRDMKETVDKLKKEIEKLLEENKESAKELRERIKENLETNRDLVRKLEEDIKR

SEQ ID NO: 18271 - protein, 59 aa, Artificial Sequence
  Synthetic
DEAEKALEEVRDLIREIRERDRKVTEDVERLNREIREKLKEVTERVKRSNDDIRRLLEE

SEQ ID NO: 18272 - protein, 56 aa, Artificial Sequence
  Synthetic
KSILEELERLVRELRKESEKSLEDLERLNKKLEDEVRDILRKLNKLNEDLLRKVEE

SEQ ID NO: 18273 - protein, 59 aa, Artificial Sequence
  Synthetic
SEMDEARKEVKKLLDEVRKRDEDVTRKVEELNKRIEERAKRVAEEVEKLIREILKRLRD

SEQ ID NO: 18274 - protein, 56 aa, Artificial Sequence
  Synthetic
EKILEDLRRLVKKLKEESDRSLERLERLNERLERRIREILKRLEKLVRELRKEVER

SEQ ID NO: 18275 - protein, 59 aa, Artificial Sequence
  Synthetic
SEAEEALRKVEELIRRVKKRDDEAVKEVRELNKRIADILREVLETVRKLLEDVEKALRD

SEQ ID NO: 18276 - protein, 56 aa, Artificial Sequence
  Synthetic
EDILRTLRELVRDLERKSEESLKELNRLNEDLKREVKRVLDELEELVRRLKKKVDD

SEQ ID NO: 18277 - protein, 57 aa, Artificial Sequence
  Synthetic
QVEDVIRESKKLTEDSEKRVRDIIRRLKKTIKDSEDRVRRMVEELRERIKRLRERLE

SEQ ID NO: 18278 - protein, 60 aa, Artificial Sequence
  Synthetic
SDEVIETLLRKDRDLNRRVNEELRKLEEEVEELNRRVNETIKEILRRIAELIRRILEKTK

SEQ ID NO: 18279 - protein, 56 aa, Artificial Sequence
  Synthetic
KVEEILKELEELIKRSKETVDEVIKRSKDLVDESRRRIEDVIRELEKLIRELDKKL

SEQ ID NO: 18280 - protein, 60 aa, Artificial Sequence
  Synthetic
SEEVVRTLVKEIRDLNKRVNEEIKRLLDEDKKLNEEVNRLIKELKKEIEDLIREVLEDKR

SEQ ID NO: 18281 - protein, 57 aa, Artificial Sequence
  Synthetic
EVEDIIRESKKLIEDSKERVKEVIKESKRLIEELERTVREVIKELRERVDRLRKKLR

SEQ ID NO: 18282 - protein, 60 aa, Artificial Sequence
  Synthetic
SKEVLDTLLKEDRDLNEDVKRRITELLEEDRRLIEEVKKRIRELRERIKRVIEEVDRATT

SEQ ID NO: 18283 - protein, 57 aa, Artificial Sequence
  Synthetic
STAEEIVRRIRDVNRRINEAIERLLEEDEKVIRDVERRIEEVLERDRRVIEEVKRRV

SEQ ID NO: 18284 - protein, 56 aa, Artificial Sequence
  Synthetic
ERIIEEIKRILKESEDRLRRILETSRERLKELKKKLERVLEDSKKKLDELRRELRK

SEQ ID NO: 18285 - protein, 57 aa, Artificial Sequence
  Synthetic
REAEDLVRKVREVNKKANRDIKELLDRDEKVIREVARAAEAIVDEARRIVEEVERKI

SEQ ID NO: 18286 - protein, 56 aa, Artificial Sequence
  Synthetic
ERIIKEIKETLDESRKRAEEVLEKSRRLLEELRKRVEEIVKRIKELIDELERRVRK

SEQ ID NO: 18287 - protein, 59 aa, Artificial Sequence
  Synthetic
SAEEIIKTLEELVEKLKRDAEETLRKIEELVRRLEEEARKSSEKIRKLVEDLAKEARER

SEQ ID NO: 18288 - protein, 59 aa, Artificial Sequence
  Synthetic
DEVLTEVLKEITELVKRLKELSDRTLEEVRKLVERVKRESKRTLEEAEEVVRELKERLR

SEQ ID NO: 18289 - protein, 59 aa, Artificial Sequence
  Synthetic
DAERLLREVEELVRRLEEEMEKTDREIKELIKRLEERLRTTSREIKKLIEDLEREARER

SEQ ID NO: 18290 - protein, 59 aa, Artificial Sequence
  Synthetic
REVLKKVIDEIRKLVKRVKDESKRSLDEIRKLAEEVDRRSKKVLDEIRRLVDEVRERLR

SEQ ID NO: 18291 - protein, 59 aa, Artificial Sequence
  Synthetic
DAEDILREIKKLADDLKREADKSLKEIEELARRLEEEAERSLREIEELARRLKKRADEK

SEQ ID NO: 18292 - protein, 59 aa, Artificial Sequence
  Synthetic
REALKRAAERARELADRARKLSEDTLRKAKKLADDARKLSRETLEKARELAERAERRLT

SEQ ID NO: 18293 - protein, 59 aa, Artificial Sequence
  Synthetic
DEAEEVRERVKKLIEESKRLIEEVRRRVRTISERSAELIEEVERRVDKMARDVERLLKD

SEQ ID NO: 18294 - protein, 56 aa, Artificial Sequence
  Synthetic
DEVLRRLEKLVRDSNDEIRRVLKELKEVVKKNRDEIERVLKEARKKVEDLLREIER

SEQ ID NO: 18295 - protein, 59 aa, Artificial Sequence
  Synthetic
SEVERVRRENEETIRRIDEVIKKIEEDNKRTIDEIRDVIRRVKETVEKTNREIEKVRRD

SEQ ID NO: 18296 - protein, 56 aa, Artificial Sequence
  Synthetic
DEALRELRKSNEDLERRIRKVLEDLKRSNDELLEEIDRVLKRLHKSDEDVRKRVTD

SEQ ID NO: 18297 - protein, 59 aa, Artificial Sequence
  Synthetic
RELEEAEKTVEELIRRIKEIIDEVLKRDRDVSERSKELIDKVKREAEKIVEEIERLLKN

SEQ ID NO: 18298 - protein, 56 aa, Artificial Sequence
  Synthetic
SEVLRKLDKKVKDLKREIDDVVRESKELIKRNRRRVEEVAKELERLIKEVKDRIDT

SEQ ID NO: 18299 - protein, 59 aa, Artificial Sequence
  Synthetic
DELERVREEVRRLIKEIEEIIERVERRDEEVSRKSEDLIRRVLKRDEELAKEIEDLKRN

SEQ ID NO: 18300 - protein, 56 aa, Artificial Sequence
  Synthetic
SRVLEELKRLVEELEREIRRVFEKSKKLIDDNRKKADDVVKRSEDLLREVKKEIDR

SEQ ID NO: 18301 - protein, 60 aa, Artificial Sequence
  Synthetic
SESEEVERLVEDVSRRNTKAVRDIEEHSKDVSRRNKKLVREVEEHTREVIERAKELTKRR

SEQ ID NO: 18302 - protein, 56 aa, Artificial Sequence
  Synthetic
RDVVERIRRLLRENVEENKKVLKRSDDLLKKNERENREVVKKSEKDARDLVEEIKT

SEQ ID NO: 18303 - protein, 60 aa, Artificial Sequence
  Synthetic
SEEEDVRRKVEKVSRENKDMVRRILEHSRKVSEDNRRLVKEILDRARKAIEDVKELIERL

SEQ ID NO: 18304 - protein, 56 aa, Artificial Sequence
  Synthetic
RDVVREIKELLDRNREENRKVLEDSERLVDENEKDNKRVLDELRRLLKRAEEEARR

SEQ ID NO: 18305 - protein, 60 aa, Artificial Sequence
  Synthetic
SIDKALRDLKEILDRNRKHSEDLLREAEELVERSNDHSRRVLEEIRKLLRELEEEIRKRV

SEQ ID NO: 18306 - protein, 59 aa, Artificial Sequence
  Synthetic
EKLVREVEKTVEDLSRENKKLNEDVKRTVDELIKKSEKLNEDAKRTIDELLKRVKERIE

SEQ ID NO: 18307 - protein, 60 aa, Artificial Sequence
  Synthetic
SVEDLLRKLKTIVDENRERVKKSLEELRRILDENRRRVERSLRELRESNERLRKEIEDTV

SEQ ID NO: 18308 - protein, 59 aa, Artificial Sequence
  Synthetic
EEVLKKVEETVKRLSDENRELNKRIKEEVDEMSKRNKELNKRIKEENDKLIKEVKDEIR

SEQ ID NO: 18309 - protein, 60 aa, Artificial Sequence
  Synthetic
SVEDVLRELKELIDRNREEAKKTEKELRELIKRNDDEAEKVAKESKKLTEDLEKEAREKV

SEQ ID NO: 18310 - protein, 59 aa, Artificial Sequence
  Synthetic
EKVLREAKERAKEISKRNKDVNEEARKRIKEISDKDKRILDEVRRESKEIEKRLKEALK

SEQ ID NO: 18311 - protein, 60 aa, Artificial Sequence
  Synthetic
DDEERVREVVKRVKEDNERVDREIREIVKRLLEHDRELLEEIKKEVDRVAEELRKLKEDG

SEQ ID NO: 18312 - protein, 56 aa, Artificial Sequence
  Synthetic
SEVLERLRKTLEELEKRNEELLEEARRLLEESREEVRELLERAKKILEDLEREIRR

SEQ ID NO: 18313 - protein, 60 aa, Artificial Sequence
  Synthetic
SREERVREVVKRMLERDEELLRRIREEVERALRRNDEVLREIERVVEEMEERVERLKREG

SEQ ID NO: 18314 - protein, 56 aa, Artificial Sequence
  Synthetic
DEVLEDLRRLLEESVRRVEDLLKKLTDIVRESRKRVRDILRKAKRIVDKLREEIKK

SEQ ID NO: 18315 - protein, 60 aa, Artificial Sequence
  Synthetic
DVEREAKRLLEEVAEHVRRSIKELRKLLEDVARHVEKTLRELEKLTDDVRKRVEKLKRDV

SEQ ID NO: 18316 - protein, 56 aa, Artificial Sequence
  Synthetic
RKVVEDIREKVKDLKRKHDTVLEEIKKEVRRLEKEHKEVLDKSNEDARKLEEDLRR

SEQ ID NO: 18317 - protein, 59 aa, Artificial Sequence
  Synthetic
SEREEAKKLLRENEEDNRRVDREVEKLTEENERINRRVNEEVRKLTEDIKRKVESVKRL

SEQ ID NO: 18318 - protein, 56 aa, Artificial Sequence
  Synthetic
RDIVEDIRRKADRLRERNEETLKRDEDKLKKLEESNRKVLKEDEDELRRLADKLRK

SEQ ID NO: 18319 - protein, 60 aa, Artificial Sequence
  Synthetic
SEAEEAAKRSRDTAKRAEEIAREAAERLKKNAEDAERIAREAKKTSKKTAKEAEDAARSN

SEQ ID NO: 18320 - protein, 55 aa, Artificial Sequence
  Synthetic
DELRELAKRTEDKARKLADELRKLADETEKKARKLAEEVKKLADDTRRKAEEARR

SEQ ID NO: 18321 - protein, 59 aa, Artificial Sequence
  Synthetic
DEVEKAKEESRRTLKKIEDRVRKVAEDLKKNLEDIERRVREVLEELRRLLEEIEEVVRR

SEQ ID NO: 18322 - protein, 55 aa, Artificial Sequence
  Synthetic
EELERLVEKTEDKIRKLLEEIKELLKETEKKIRKLLKRIEELMKEIEDKIDEDKK

SEQ ID NO: 18323 - protein, 59 aa, Artificial Sequence
  Synthetic
DEVERVKEELKRNLKEIREDVERVKEESRDTVRKATEIVKRVLEELKKSLEEIKKLVDD

SEQ ID NO: 18324 - protein, 55 aa, Artificial Sequence
  Synthetic
EELRDTLRKSAEDIERLLREIEDLVRKTTEDAKRLADEVRRLVKESERTIKERAD

SEQ ID NO: 18325 - protein, 59 aa, Artificial Sequence
  Synthetic
SEVEKVDRELKDNLRRIEEEVRKVDEELRRLLEEIRRTVEEFKERSKRTVEEIEKVARE

SEQ ID NO: 18326 - protein, 55 aa, Artificial Sequence
  Synthetic
EELRRTLEESERRIRKLLEDLKRLLEEIEKDIRRLEEEVDKLVRDTEKRIDDLRR

SEQ ID NO: 18327 - protein, 60 aa, Artificial Sequence
  Synthetic
SLEDELRRRITEAEKRIRDLLRRVRELVERSKKTIKDLLRKLEETARETKDEIRKLEEEV

SEQ ID NO: 18328 - protein, 59 aa, Artificial Sequence
  Synthetic
EEKVRRVEREIKEILKKIEEDVTRLLEENKKILKEVEDLVRELEKEDRDVLKKVRDDVK

SEQ ID NO: 18329 - protein, 60 aa, Artificial Sequence
  Synthetic
DLRERLEEEIERARRDIEDLLRKAEELAKRSKDDIKRLMDEVRRLVEKTRRDIEKLLREV

SEQ ID NO: 18330 - protein, 59 aa, Artificial Sequence
  Synthetic
EEKVRKVEEEIRRVLEKIRRDARKLLEENKRITDEVRKRVKELLEENRKVLKRIKDEVD

SEQ ID NO: 18331 - protein, 60 aa, Artificial Sequence
  Synthetic
KLREELEKLAEEAKKRIEDLAREAREAAKRASESNKDLARRLRELAKRTEDEIKRLLDDA

SEQ ID NO: 18332 - protein, 59 aa, Artificial Sequence
  Synthetic
EEAARKAAEEIKKILEEAERLAREALKELERSNEESERLARRAAEEDKRVADEARERAR

SEQ ID NO: 18333 - protein, 60 aa, Artificial Sequence
  Synthetic
SLREELRKKIEEAKKRIEKLMDDVRKEAEKAKRSNEELLRRLRKLAKETKRRIEELLERV

SEQ ID NO: 18334 - protein, 59 aa, Artificial Sequence
  Synthetic
EEKVRRLLKEIEEILRRIEDKVRKLLKELRDSNRDSKRLVDELMRRDKEVLRRIEEEVK

SEQ ID NO: 18335 - protein, 60 aa, Artificial Sequence
  Synthetic
DLERELEELIKKAEKKIRDLRKEVEDVVRDASRSNKELLREAEKLAEETRKRIDDLRKEV

SEQ ID NO: 18336 - protein, 59 aa, Artificial Sequence
  Synthetic
EEKVRELEKRIRDVLRRIEEEVRRLLKRLKDSNDDSRRRLEELLRRDKKVLEDIERETK

SEQ ID NO: 18337 - protein, 60 aa, Artificial Sequence
  Synthetic
SLREELERLIKEAEEKIRRLLKEVKDLVRELSRTNKKLLKEVRDLAKRTKERIKRLLDEL

SEQ ID NO: 18338 - protein, 59 aa, Artificial Sequence
  Synthetic
EDKVRKLLEDIERLLREIERLVRELLEELKDSNRRSEELVRRLLKEDKDVLEKAERDVR

SEQ ID NO: 18339 - protein, 57 aa, Artificial Sequence
  Synthetic
DEEEELRRLVRRLMEEVKRLLEENKKLADELRKTVKKLLEDNEDLARRLREEVERKV

SEQ ID NO: 18340 - protein, 56 aa, Artificial Sequence
  Synthetic
VEEVKKELEELLREVEELSRRSLKELKELLERVKKRSEESLKELEDLLREAERKSR

SEQ ID NO: 18341 - protein, 57 aa, Artificial Sequence
  Synthetic
SEKEELKKEVDRLAEEVERLLRENEKRARDLERKIRKLLEENRRAADEVRKEVDRTV

SEQ ID NO: 18342 - protein, 56 aa, Artificial Sequence
  Synthetic
VEEVKKRLEDLLEEVKELSKRSEDTLRKLAEDVKRLAEDSNKKLEDLLEEAKERAR

SEQ ID NO: 18343 - protein, 57 aa, Artificial Sequence
  Synthetic
SEKEELRDLVRRAKEDVDRLRRENEELNRRIEEDIERLLKENEDRNREVKDDIDKRV

SEQ ID NO: 18344 - protein, 56 aa, Artificial Sequence
  Synthetic
VEEVKKELEELLRRVRKLSEDSLKHLRELLKEVRELSERSLRHLDELLRRVREKAR

SEQ ID NO: 18345 - protein, 57 aa, Artificial Sequence
  Synthetic
KDEEDAERRARESDKSIEELRERNEREAKRLKEEVEKLLEENEKKVDELRKRVEKTV

SEQ ID NO: 18346 - protein, 56 aa, Artificial Sequence
  Synthetic
MEEVKEELDRLNKEAEELSRRSLRKLEELLREARRLSRESKERLKKLLEDARRKSN

SEQ ID NO: 18347 - protein, 57 aa, Artificial Sequence
  Synthetic
SDEERAREEARRSKESIERLLEENRRLAKELKKEIRRLLKENEDLVRKLKEDVDREV

SEQ ID NO: 18348 - protein, 56 aa, Artificial Sequence
  Synthetic
IEEVLEELDRLNKEVEELSRRSLKRLEELLEEVRKLSEDSLRKLKELLDRVREKSR

SEQ ID NO: 18349 - protein, 60 aa, Artificial Sequence
  Synthetic
DERERLRKALEEVRRTVEKLVRENEELLKKVEERVRRLNDEDRRLVEEIKRRADELRKRG

SEQ ID NO: 18350 - protein, 59 aa, Artificial Sequence
  Synthetic
DEVIRRVEDELRKVLEDIKRLSDKNKRDLEEALRDIERLVKENNKRLKEALDDLERAAT

SEQ ID NO: 18351 - protein, 59 aa, Artificial Sequence
  Synthetic
SEREDLKRELDEVRKDVARLNEEDRRLLEDARRDLEKLVRDNEELVERVKKTLKELEDR

SEQ ID NO: 18352 - protein, 59 aa, Artificial Sequence
  Synthetic
DEVIRRVRDRLRRVDEELKELVKRNNERLREVLERIRKLSRDNSERLKAALEKIKEEVR

SEQ ID NO: 18353 - protein, 60 aa, Artificial Sequence
  Synthetic
SLKEKIEKLLEESRKDIEELNERDKKRVKESEDTVRRLNEEDEELVKRVREELEKLRKEG

SEQ ID NO: 18354 - protein, 59 aa, Artificial Sequence
  Synthetic
EEVIKEVEKRLRDVTKTSREKVRENNRRLEEMTEDTKRLVEENNKDLDKALKDIRKKAE

SEQ ID NO: 18355 - protein, 60 aa, Artificial Sequence
  Synthetic
KEREELEKLLEEVERDVARLNKEDKDLVDEIRRRVDELVKRDKELLDRVRDRLRELSERG

SEQ ID NO: 18356 - protein, 59 aa, Artificial Sequence
  Synthetic
SRVIEKVKRDLRRVLEELRRLAEENNRRLDKALKELEDLVRKNNKKVEDALRKIEEEVR

SEQ ID NO: 18357 - protein, 60 aa, Artificial Sequence
  Synthetic
ELAEDLRRLLKEVEDRSRDLLRKNRKLLEEVRERTERLIKELEDLLEEITRRVKDLIRKI

SEQ ID NO: 18358 - protein, 59 aa, Artificial Sequence
  Synthetic
EELVRRVKEEIKRLMEEDKKLNKKSVEEIRELLKRDRDLIEEVKKEAERLLKEIEDEVR

SEQ ID NO: 18359 - protein, 60 aa, Artificial Sequence
  Synthetic
DLERELEKLLDEVRRRVEELNKRNEDLARKVAEDTKELLKELRELLEEVKRRVRDLIRKI

SEQ ID NO: 18360 - protein, 59 aa, Artificial Sequence
  Synthetic
REVAERVKEEIRRLLKEIEELNKRSEERIKKLLEDDRRLIERVKERIEDLLRRIEERTR

SEQ ID NO: 18361 - protein, 57 aa, Artificial Sequence
  Synthetic
DEVDELLKRLEDSSRKAEEDVKRMLERLEDSTRDAARRVKEMIKRNEEVSDEAEKRI

SEQ ID NO: 18362 - protein, 59 aa, Artificial Sequence
  Synthetic
DKVVKEIDDLLRESERRNRELLREIEELLKESERINRELLKEVDKVLRDSEERVERRRE

SEQ ID NO: 18363 - protein, 60 aa, Artificial Sequence
  Synthetic
DLERRLDKILRDIEEAARDNIRRNEELLKRSEENVRRNLEENKKKLEEIKREVEELERRV

SEQ ID NO: 18364 - protein, 59 aa, Artificial Sequence
  Synthetic
EELAKRAEERLRELLKELHEISKKMLREIKRVNDEINKVSKESLDELDELVKEIKERTR

SEQ ID NO: 18365 - protein, 60 aa, Artificial Sequence
  Synthetic
SLEEELRKMLEKVERDVRRNIERNKRLLDRSRENVKENIKKNRELLKEIEKDVRKLETDV

SEQ ID NO: 18366 - protein, 59 aa, Artificial Sequence
  Synthetic
EKLAEDAKRRLEELVREIHKISEDALEEIKRVNKEINDVSKEMLDRLRELLKEIKERTR

SEQ ID NO: 18367 - protein, 60 aa, Artificial Sequence
  Synthetic
SLEEELEKLLDEVRKEVKKNIDENKRLLDKSREEVRKNIKTNEDLLRRIEEKVRRLLEEV

SEQ ID NO: 18368 - protein, 59 aa, Artificial Sequence
  Synthetic
EELAERAKRELKKLEEEIHRISREALERSKKTVEELHEISKRMLDELKRVDKRLEDETR

SEQ ID NO: 18369 - protein, 60 aa, Artificial Sequence
  Synthetic
DQREDLDRRLREIEERVEENLRTNEELLKEVEKNAKENIDRNRKTLEDIKRRVDDLRRRV

SEQ ID NO: 18370 - protein, 59 aa, Artificial Sequence
  Synthetic
DELVERVKDELRKLVKEIHDVSKKALEDLERLLRELNEISERALRTLEKLLRKLEEDTR

SEQ ID NO: 18371 - protein, 60 aa, Artificial Sequence
  Synthetic
SLEETLKRILDKVREEAKRNIKENEDLMRESRRNVEENIRRNEKTLEDIEEEVRRLREEV

SEQ ID NO: 18372 - protein, 59 aa, Artificial Sequence
  Synthetic
EELAKRVKEELDKIVRRVHEISRRALEESRKTVEELNRESEKVLRELERLLRRLEEEVR

SEQ ID NO: 18373 - protein, 60 aa, Artificial Sequence
  Synthetic
SDEDDLRRILEEIRRNVERNIRENERLLDEIKKRVDENIKTNKKTLEDIREEVRKLEEEV

SEQ ID NO: 18374 - protein, 59 aa, Artificial Sequence
  Synthetic
RELVKRVEDTLRDLLRKLNEISKRALEELKRAVERIHRISRDALRELDRLRKELEERTR

SEQ ID NO: 18375 - protein, 60 aa, Artificial Sequence
  Synthetic
DDEERLDKILRDIEENARRNIERNRTLLERSRENVKRNIDENRRKLEEIRRDVEDLKRKV

SEQ ID NO: 18376 - protein, 59 aa, Artificial Sequence
  Synthetic
KELVKRAEDELRRLLKELNEISERMLRRSEETVRRLNEVSERALRELDRLRKKIERRTR

SEQ ID NO: 18377 - protein, 60 aa, Artificial Sequence
  Synthetic
SLEETIRRILEESERNVKRNIDENRKLLKEIRDNAKRNIDENRRLLEEIERTVRDLERRV

SEQ ID NO: 18378 - protein, 59 aa, Artificial Sequence
  Synthetic
EKLAEDVLRELDKANKDINEISKKMLEDLKKAVEDVNRVSKEMLERLKRLREEIEKRTR

SEQ ID NO: 18379 - protein, 60 aa, Artificial Sequence
  Synthetic
KDEERLDEILDRSRRNAETNIKRNKDLLDESRENVKENIKKNEDLARRIRERVEDLERKV

SEQ ID NO: 18380 - protein, 59 aa, Artificial Sequence
  Synthetic
EELVKRVEDELRRLNEEVNKISEEMLKRSKDTVRELNKVSEDALRKLDELRERIERRTT

SEQ ID NO: 18381 - protein, 60 aa, Artificial Sequence
  Synthetic
SLEEDLRRILKEIRDNVRENIRTNEELLKRSRENVKENIERNKKLLREIEEEVRRLEREV

SEQ ID NO: 18382 - protein, 59 aa, Artificial Sequence
  Synthetic
EKLAKEVKDRLRDLLRKLNKISEDALRELKRLNDEINRISEEALERLKKLLEDLERRVR

SEQ ID NO: 18383 - protein, 60 aa, Artificial Sequence
  Synthetic
SLEEKLRKILEESRENVERNIRRNEDILRKSRRNVEENIKTLEKILEDIKRTVDKLKKDV

SEQ ID NO: 18384 - protein, 59 aa, Artificial Sequence
  Synthetic
EELARKVERELREMNKELNRISEEALKRIEEVNRDINRVSKEVIEELERLVEKIREDVR

SEQ ID NO: 18385 - protein, 60 aa, Artificial Sequence
  Synthetic
DLERELRKAAKESRENAEKNKEDNKEAAKRSKENAEKNIRDNEETARKIEEDARKLEKDA

SEQ ID NO: 18386 - protein, 59 aa, Artificial Sequence
  Synthetic
EDLARKALRDLREANKRANEISKKALDEIRKANEDANRASKKANDDLRRLAEKAKRDAE

SEQ ID NO: 18387 - protein, 60 aa, Artificial Sequence
  Synthetic
DLERELRELLERVRKDVRDNLETNKKLLEESRKNAEDNLRENDRLLKELEKRVKDLLDEL

SEQ ID NO: 18388 - protein, 59 aa, Artificial Sequence
  Synthetic
EEVVKRVLDDIKRIVDEINRISKEMLDKLKRINDEANKISKRMLDELRRIAEEIEREVR

SEQ ID NO: 18389 - protein, 60 aa, Artificial Sequence
  Synthetic
DLEERIKKLLEESRKNVEDNEKKNKDSLRRSREEVKRLSDENEKLLKRIRERAEKLKTDL

SEQ ID NO: 18390 - protein, 59 aa, Artificial Sequence
  Synthetic
KRVVETVLRELERINEEINDISRKMLKENEKILRDIKKINEDMLKRLKEALERVDREVN

SEQ ID NO: 18391 - protein, 60 aa, Artificial Sequence
  Synthetic
SLEEEIRDILRRAEERVKELTKENERSLRESKKRVEDLSRENEKTLEEIKRDVDRLLKEL

SEQ ID NO: 18392 - protein, 59 aa, Artificial Sequence
  Synthetic
EDVVREMLKDLERIVREISEDNARTLEENERILREIEEENKKTLERLREILKRIREEVT

SEQ ID NO: 18393 - protein, 60 aa, Artificial Sequence
  Synthetic
SLEEEIRKILKRIREEVKRLTEENDKTLKDSERNVRENLTEIERILREAADDVRRLEEEL

SEQ ID NO: 18394 - protein, 59 aa, Artificial Sequence
  Synthetic
EEVVERVLRELERLLEEIRDRNKKTLDDLRRINEEVNRISKDALEELRRLLRELRELVK

SEQ ID NO: 18395 - protein, 60 aa, Artificial Sequence
  Synthetic
SLEDEIRKILDELRKNVRENLEDNKRVLREAEEEAKKLSEDNRRLLKELKERVKELKDRL

SEQ ID NO: 18396 - protein, 59 aa, Artificial Sequence
  Synthetic
EEVVRRALEEIERINRDINRRSKEVLDELREIVREAKEDNERTLRKLKKILEEIEEKVR

SEQ ID NO: 18397 - protein, 60 aa, Artificial Sequence
  Synthetic
RLKEELERILREAEKNVRENLRRNRESLKESKETVDRLSEENKKTLEEVRTTVEELLKEL

SEQ ID NO: 18398 - protein, 59 aa, Artificial Sequence
  Synthetic
EEVVRDALRKLEEINRRINEISERMLKENKRLLEEIKRINKETLDRLKELLEEIKEDVR

SEQ ID NO: 18399 - protein, 59 aa, Artificial Sequence
  Synthetic
SDVERVEKELKKTNDELRKIVDEARKLLEKTNKEIRDINRTMMEELRRTNEDLKRVVER

SEQ ID NO: 18400 - protein, 59 aa, Artificial Sequence
  Synthetic
RRVIERIREIARKNEEDVKKLLKELKDLLEKNKRDVEKASEENKKLLEDNERDVRREST

SEQ ID NO: 18401 - protein, 59 aa, Artificial Sequence
  Synthetic
KEAEEAAKLLEDTNRRLKEIAEEAEELLRRTNEKAKKINDESREKIKDAARRAEDAARR

SEQ ID NO: 18402 - protein, 59 aa, Artificial Sequence
  Synthetic
EKAIREIKELAKKNKEDAERALERIKRLADKNREDAKRADEDNERAAEEARRKAEELKR

SEQ ID NO: 18403 - protein, 59 aa, Artificial Sequence
  Synthetic
DEAEDVERKLEATNKELNEINERSRKELETSNRELNRINTESEEEIRRIEERIDRVKKR

SEQ ID NO: 18404 - protein, 59 aa, Artificial Sequence
  Synthetic
KELIERIKRLLDKNREDVKRMNEDNKRLLKENRDDVKRMDEKNKKILDEVDEKAKEKEK

SEQ ID NO: 18405 - protein, 60 aa, Artificial Sequence
  Synthetic
SEEEELKKLLDRVRERVERSLDEIRRLAREVEEHVKKVNDDIRRLLDEIRREVEDIERRV

SEQ ID NO: 18406 - protein, 55 aa, Artificial Sequence
  Synthetic
DEVRELVRTLEERIDDSTREVKKLIEDLKRENKRILDTVRDLVRRLREKIKRIAD

SEQ ID NO: 18407 - protein, 60 aa, Artificial Sequence
  Synthetic
DEEERLAELLERVKRDVDRSLKRIRDLLKELEKHAKEVNDDIRRLLEEVERRVREMEKRV

SEQ ID NO: 18408 - protein, 55 aa, Artificial Sequence
  Synthetic
REVEELIRRMLKRIRDSTKKVEDELRRILEENRRILEEVRREIDELKKAIDEISR

SEQ ID NO: 18409 - protein, 60 aa, Artificial Sequence
  Synthetic
SEEERLEELLRRIEKHSRELIRELEKSLEDSEREVRKSLKRIEELLRRAERKVREIRKRV

SEQ ID NO: 18410 - protein, 55 aa, Artificial Sequence
  Synthetic
REVKKVLDDLLKRDRDAIDEARKLNEEMLKRIEDSSREVEKLLADMEKTIEDIEK

SEQ ID NO: 18411 - protein, 60 aa, Artificial Sequence
  Synthetic
SIDDKARKDLKRILDENRDIVRRVEELIRRSDELLKRILDDVKRRIDELRKKLEDIARKV

SEQ ID NO: 18412 - protein, 59 aa, Artificial Sequence
  Synthetic
EDVLRDIDRLLKEIKKHAEDSLRKIEKLLRESEEKVKDILRKIKKLLDEARKEVEDRRR

SEQ ID NO: 18413 - protein, 60 aa, Artificial Sequence
  Synthetic
SIAEEVEELIRRLETKNRKIVKDVEDAIRASDDKNRRVLDKVRKDVERLKRELDRIAKEV

SEQ ID NO: 18414 - protein, 59 aa, Artificial Sequence
  Synthetic
KEVLDRIKELLKKLEKHVKDSLDKIDDLLRKSEKHVRESLETIKRLLEELEREVERLAR

SEQ ID NO: 18415 - protein, 60 aa, Artificial Sequence
  Synthetic
DEKREVERLIRELIEENRDIVRRVEKLVRESNKKLDEILEEIRERLERLREKLKDIKRRV

SEQ ID NO: 18416 - protein, 59 aa, Artificial Sequence
  Synthetic
EEVLRRIRELLERVEKHVRDSLRRIDELLKRSEERVRRIIREVRERLKRLEEEVREAKR

SEQ ID NO: 18417 - protein, 60 aa, Artificial Sequence
  Synthetic
SISEDAERLVRELLRKNKEIRDRVEELVRRSNDKNRRVLEEVEKRLRDIIRKLEDIERRV

SEQ ID NO: 18418 - protein, 59 aa, Artificial Sequence
  Synthetic
EEVLRRIRDLLRRVTEHVEKSKRDIEKLLRESRDHVRRSKEKIKRLLDEARERVERSKK

SEQ ID NO: 18419 - protein, 60 aa, Artificial Sequence
  Synthetic
DEEDKLRKLLEEAREAVKRALERVDKLLRDSEREVRRILEEVKKLLDESRKAVEDIRRKA

SEQ ID NO: 18420 - protein, 56 aa, Artificial Sequence
  Synthetic
SEEAEELIRRVIRKAEKLLREVEELLRRSNDKLRKLTEKVRTDLERSKKRLEDEAR

SEQ ID NO: 18421 - protein, 60 aa, Artificial Sequence
  Synthetic
SILEKVRELLERIRDTVRKILREIEKSLEDNKRHSDEVLKEIEDLLRDLERRVKEIEERI

SEQ ID NO: 18422 - protein, 59 aa, Artificial Sequence
  Synthetic
EEILEEIERLIREVRRRLKKILDDVRELSRRANEKDRKSLEEVRKLVEDVRRELERVAT

SEQ ID NO: 18423 - protein, 60 aa, Artificial Sequence
  Synthetic
DVEEEVKKLLEDLERHSRKVLEEIKKLLKELEDHNRKTVEDIEELLRELEKEVRKLEEDV

SEQ ID NO: 18424 - protein, 59 aa, Artificial Sequence
  Synthetic
EEILEEIRRLAEELEKEDRKTLKEARDLAREVKKRNEEIKRRVEELIKKVDRELKEVAR

SEQ ID NO: 18425 - protein, 60 aa, Artificial Sequence
  Synthetic
DEDEDVRRLLRRLREKVRRVKKKIDDSLRENRKKVRKTNEEVKKLLEDNRRRIEDVKRKR

SEQ ID NO: 18426 - protein, 56 aa, Artificial Sequence
  Synthetic
SEEARKLMRELEKELKEIEDEVDKMSEEINRKNDEILRRARELIKRNNELLEEIRR

SEQ ID NO: 18427 - protein, 60 aa, Artificial Sequence
  Synthetic
SEEEEVRKLLERLERTVEKTNRDVERSLRENEKRVRETNDEVRRLLEENRRRIEDVERKL

SEQ ID NO: 18428 - protein, 56 aa, Artificial Sequence
  Synthetic
SEEAKRLIEELEKRNREVKKEVEEMSRRINKKNEEILREARKLIEENNKLLKDIER

SEQ ID NO: 18429 - protein, 60 aa, Artificial Sequence
  Synthetic
SELDEIAKAIRRLLEEVRRKNERIDEDIRRLLDELREHSEKVLREIEELLRRLEDAVRKR

SEQ ID NO: 18430 - protein, 59 aa, Artificial Sequence
  Synthetic
KDARKRAKDVLRDLEKKVEDLKRRNDKTLTDAKRELDDSRRRVKRVLDELEKVLRDLKR

SEQ ID NO: 18431 - protein, 60 aa, Artificial Sequence
  Synthetic
DEAERILEEVKKLLEEVERLNKKIDDEARRLLREVERENEEIDRDIKRLLDEVRKDVERN

SEQ ID NO: 18432 - protein, 59 aa, Artificial Sequence
  Synthetic
EEVRRRAEEVLRELEKVVEDSRRRNEKTLRDMERRIKELEDRNRDTLRKLREVVKELER

SEQ ID NO: 18433 - protein, 55 aa, Artificial Sequence
  Synthetic
SEEERVRELIERMREMLERLEESNKKVLEEIERVLEKSERDVERVIREIERTLEE

SEQ ID NO: 18434 - protein, 56 aa, Artificial Sequence
  Synthetic
TDRVIREAERVLEEVRRRNEKVNKEARDLLKEVEKHSRDVLEDIKRLLEEIRERAR

SEQ ID NO: 18435 - protein, 56 aa, Artificial Sequence
  Synthetic
SEKERIEDVIRRIEKVLKESRDEADRVKKEIEKRLRELEKRHKEVTTEVKRVAEEV

SEQ ID NO: 18436 - protein, 56 aa, Artificial Sequence
  Synthetic
SETVLREAEELLRRVKKHSKEVLDRVRELLKRVEEKSERVLRELERVLREIREKAR

SEQ ID NO: 18437 - protein, 55 aa, Artificial Sequence
  Synthetic
KDEERIEELLRRNEENLRRLEDSNRKVLRENEEILKELKRRHEKITEDLKRELEK

SEQ ID NO: 18438 - protein, 56 aa, Artificial Sequence
  Synthetic
TDTVLREATELSKEVHKENRRVNEEAKDLSRRVAEESDRILRELKKLLDEIRKRAK

SEQ ID NO: 18439 - protein, 55 aa, Artificial Sequence
  Synthetic
SDEERIRRVIEDIERKLRELEKRHKEVTRENKENAKELKERHDRVTKDIKKTLDD

SEQ ID NO: 18440 - protein, 56 aa, Artificial Sequence
  Synthetic
TDRVLEEIKKLLREVEERSDRALREAKKLSKRVHERSKEVIDRLRELLREIKREAD

SEQ ID NO: 18441 - protein, 59 aa, Artificial Sequence
  Synthetic
DSAREMERRIRELLKRVEDKSEKALRDSKKLTKEVEEESERALRRTEKLLREVAELARR

SEQ ID NO: 18442 - protein, 56 aa, Artificial Sequence
  Synthetic
EKRVRDVLREIEEVLRRLEERHERLTRDDERVLRELEDRHRKLSERVKKLLEELKK

SEQ ID NO: 18443 - protein, 59 aa, Artificial Sequence
  Synthetic
DRAEKAEREIRRLLERVKEDSERVLRESEELTRRVEEESRKILEETKKLTRTLEELSRT

SEQ ID NO: 18444 - protein, 56 aa, Artificial Sequence
  Synthetic
EERVKRVLEEIERLLRELEERHKRLTERDKEVVKRLADRHREVSEEDRRVLEELKR

SEQ ID NO: 18445 - protein, 59 aa, Artificial Sequence
  Synthetic
DEMEEVIRRIETLLKRVVDESDKVLEDIKRLLDRVVEESEKALETTRKLLEEVAELART

SEQ ID NO: 18446 - protein, 56 aa, Artificial Sequence
  Synthetic
EDEVRRVLERVKKVLDELAERHKELSKEIKRELRRLEKEHEDLSEEVKRLLRELER

SEQ ID NO: 18447 - protein, 59 aa, Artificial Sequence
  Synthetic
DEMREAEEEIKRLLDTVKTESDRVLEEARKLTRRVEEESERVLRETKKLTDELRKLSRK

SEQ ID NO: 18448 - protein, 56 aa, Artificial Sequence
  Synthetic
EERVRRVLKEIREVLDRLEKRHKKVSKDDKEVLERLEKEHKRLSREDEEVLRELER

SEQ ID NO: 18449 - protein, 59 aa, Artificial Sequence
  Synthetic
SRMEKVEREIRTLLKEVEERSRKVLDESRKLTEDVERISRDALKKIKELLEEVRDLART

SEQ ID NO: 18450 - protein, 56 aa, Artificial Sequence
  Synthetic
EKDVRRVLREIEELLKDLERKHKELTRRDEEVLKKLEDDHRRVSEEIEEVLRRLEK

SEQ ID NO: 18451 - protein, 59 aa, Artificial Sequence
  Synthetic
SRAERVKEEIKKLLEEVRKESKRVLKEVKDLTKEVDDKSKKVMRDIRELLKEVEELART

SEQ ID NO: 18452 - protein, 56 aa, Artificial Sequence
  Synthetic
AEEVKKVLREIEETLRKLEEEHRRLSDRDREKLDELAKRHKKVSRDIEEKLKELER

SEQ ID NO: 18453 - protein, 57 aa, Artificial Sequence
  Synthetic
KEVEDVLDKVKKALEEIRERNKRVNDEIRRLLDEVRRRNEDADREIEEILKRVADEV

SEQ ID NO: 18454 - protein, 59 aa, Artificial Sequence
  Synthetic
EELRERIKAVVEEVERVMDELRRSNEKVVREVEDVMRRLEERNRRTLERIEEVLERLKR

SEQ ID NO: 18455 - protein, 61 aa, Artificial Sequence
  Synthetic
EEVERLLTKVRELVRRIEEENKKANDDSRKSLKEIKDRVEKALDDSRKSLEEIEKIVRRDN

SEQ ID NO: 18456 - protein, 59 aa, Artificial Sequence
  Synthetic
EELKRRIETVIKEVRETIEELKKSNEESVRDSERTIRELEEEIKRTVRESEKEIKRLED

SEQ ID NO: 18457 - protein, 59 aa, Artificial Sequence
  Synthetic
EEVERMADEVRRLNEEVRRRNEESIEEVKRLNDEIRKTNEKSIEDVKELLKRVKEVRER

SEQ ID NO: 18458 - protein, 58 aa, Artificial Sequence
  Synthetic
DAREKMKRLVEENTKSVEELKKRNEETSRRNTKSVREVTRRNEKTSDDVRRLVREEEQ

SEQ ID NO: 18459 - protein, 59 aa, Artificial Sequence
  Synthetic
DEVEEAKEKVRRLNKELRRVVKEVEDEVRRLNEEVRREVEKVRDDVRKLRETIREVKAR

SEQ ID NO: 18460 - protein, 58 aa, Artificial Sequence
  Synthetic
SLEREIEKISRENTKSLRDLLDRLRRLVEENTKSVEELVRRLEELLERVEEEMRRLET

SEQ ID NO: 18461 - protein, 60 aa, Artificial Sequence
  Synthetic
SRVETMVKDIRRLLEEVKERVERALRDNERVLEDIRRRVDELLKTNEKINRDIERRVRRG

SEQ ID NO: 18462 - protein, 55 aa, Artificial Sequence
  Synthetic
EEIKEVLRRVEEEAERLKREIEESLKRSEDLVRKLKERIKRSLEESRKRIKKLED

SEQ ID NO: 18463 - protein, 59 aa, Artificial Sequence
  Synthetic
SEVEEAVKRIRKIVKEIEERVRRLLEENRRVIEEVERINKEMLKRNKEINKEVEELVRR

SEQ ID NO: 18464 - protein, 55 aa, Artificial Sequence
  Synthetic
KEIEDILRRAEETVEDLKRRIRRSLEDSRRVVEELAEENRKSLRESKKKVDELKK

SEQ ID NO: 18465 - protein, 59 aa, Artificial Sequence
  Synthetic
SRVEDFVRRIRDLLRKIEEIARKALKENKDVLREIKRINDEMLRRNEEILKRAEDLVRE

SEQ ID NO: 18466 - protein, 55 aa, Artificial Sequence
  Synthetic
EEIKRILEEAKKTIDELRKEIEKSLREVEKAIRELEERNRRSLERSEDLVRELKR

SEQ ID NO: 18467 - protein, 59 aa, Artificial Sequence
  Synthetic
RRVEEAVKRIKEILERVTRRVEKVLRDNKRVLDDIRRINEEMLKRNKEINRKVEELVRE

SEQ ID NO: 18468 - protein, 55 aa, Artificial Sequence
  Synthetic
EKIKEILEEVRRTIEELKERIRKSLEEVKELIKRMDEENRKSLEESDERARRAEK

SEQ ID NO: 18469 - protein, 59 aa, Artificial Sequence
  Synthetic
SELEEIRERVKRVEEELRKNLKDAERRVREAKRRSEESLKDIEKKVKEVRDELKELARR

SEQ ID NO: 18470 - protein, 58 aa, Artificial Sequence
  Synthetic
SAREDIKRLLKELEELLKRSEDEARRLLKEVRDLVDTTKKRIDKLLKEIEDLLREIER

SEQ ID NO: 18471 - protein, 60 aa, Artificial Sequence
  Synthetic
KIEEKVEKLVRELLKELETVDREVNERVKRSNEKLEKIDRDVNKLVEDSNRKLKEISDRV

SEQ ID NO: 18472 - protein, 55 aa, Artificial Sequence
  Synthetic
EKIKRLLEEVKKLVEDSERNIRELLKESRKKVEDSKRNLDRLLKESDDRVDRERR

SEQ ID NO: 18473 - protein, 60 aa, Artificial Sequence
  Synthetic
ETEKEVEELVKRVLDKDKRISDESEERIRRLMEKNKKILEDVKRLVDEVREKLEDIRRRV

SEQ ID NO: 18474 - protein, 55 aa, Artificial Sequence
  Synthetic
EKIKKLLEDVRRLIKRSKEKNDELLEELKRLSEETRETLDRLLKDLEDKIREAKK

SEQ ID NO: 18475 - protein, 59 aa, Artificial Sequence
  Synthetic
DEKEDVDRLLRELEELVERSERSIRKLLEDNRKLAEDLKRTVEKLLEDNRRKVEEVRRT

SEQ ID NO: 18476 - protein, 56 aa, Artificial Sequence
  Synthetic
SEELRKLIKRVLKKLRDLNRRVKELSRRSAEELKRLLDEVRKLSEDSLRELDKLRK

SEQ ID NO: 18477 - protein, 59 aa, Artificial Sequence
  Synthetic
DEEKRVRDLLEEVREEVERSDKSIEELLRELEKAVKDSERTIRKLLEDNERMVREVRRK

SEQ ID NO: 18478 - protein, 56 aa, Artificial Sequence
  Synthetic
SKEAEDLIREILEELKRLNEDVKRLIREVLETLKELNERVKKLVKESNDELRELAR

SEQ ID NO: 18479 - protein, 59 aa, Artificial Sequence
  Synthetic
REEEKLDKLRKDLEKRVEESKRSIDKLLEDNRRRVEESKKTIEKLLEDNKRRVDEIKKR

SEQ ID NO: 18480 - protein, 56 aa, Artificial Sequence
  Synthetic
SDEAEKLIRDVKKELDRLNEEVKKLSEDSLKELDDLNREVKELMERSNRKLDEDAK

SEQ ID NO: 18481 - protein, 59 aa, Artificial Sequence
  Synthetic
KEVEDVLREIKKLIKEIHEKSKRALDETRELLERIHRTTRRVLEEIRRLLKEVEELAKA

SEQ ID NO: 18482 - protein, 56 aa, Artificial Sequence
  Synthetic
KDRVEDLVRELERVVKEDKDRSKESEERIKKLVEDDTREAEKLIRELEKILEDTEK

SEQ ID NO: 18483 - protein, 59 aa, Artificial Sequence
  Synthetic
SEVEEVLRDIDRLAKEIHKRSRDVLRDIDRLLKEIHERSRRMLERIKRLLDEVRRLVEA

SEQ ID NO: 18484 - protein, 56 aa, Artificial Sequence
  Synthetic
RDRLRELVERLERLLETDKREIEKLIKKLEEMLEEDERRARELLEDIRRILEEIKK

SEQ ID NO: 18485 - protein, 59 aa, Artificial Sequence
  Synthetic
SEVEEVTKEIKRLVEEIHKRSREALEETRRLVETIHRDSKRVLDEIERLLEEVRKLAED

SEQ ID NO: 18486 - protein, 56 aa, Artificial Sequence
  Synthetic
EKRVRDLLEKLREDAKRDEDASRKSEEDIRKVVEEDKREAEKLLKRIEDELRKTEK

SEQ ID NO: 18487 - protein, 59 aa, Artificial Sequence
  Synthetic
SEVEKVLKDIRDLVKKIHDESKRVLDEIEELVRRINKRSRDALREIRELLRTVTELAKA

SEQ ID NO: 18488 - protein, 56 aa, Artificial Sequence
  Synthetic
KDRVRKLVEDLERMLRRDEAEAEKLIKKLRELLEKDRDDIRRLLEDIKRILDEIRK

SEQ ID NO: 18489 - protein, 59 aa, Artificial Sequence
  Synthetic
EEVERALDRARRLLERIHETSRDVLRRTEELLRRINEESRRVLKEAKELLDRVEKLVRD

SEQ ID NO: 18490 - protein, 56 aa, Artificial Sequence
  Synthetic
KDRVEKLERELEKVVREDEEESKKSIRRAEEMLRKDREDIRRLLEEIKKILEDIDK

SEQ ID NO: 18491 - protein, 59 aa, Artificial Sequence
  Synthetic
SEVEDVLRKAEELAKRIHDRSRKALKETEELLERINRDSERVLRESEKLLEDVRRLAEA

SEQ ID NO: 18492 - protein, 56 aa, Artificial Sequence
  Synthetic
EKTVRRLVDKLRRLVEEDTDESRKSEERIKKMVEDDKRESEKSLKRIKDIMKEITD

SEQ ID NO: 18493 - protein, 57 aa, Artificial Sequence
  Synthetic
SEVERVLEENERTLKRIEETAKKVLEEIEKLSKEVEDRAREVLDRVRRISEEVRRDV

SEQ ID NO: 18494 - protein, 59 aa, Artificial Sequence
  Synthetic
EEMRDRVRKLIKRNDEVLDRVRREIEKLHRRNKKILDDLRREIERLNRENKRLLDELRK

SEQ ID NO: 18495 - protein, 57 aa, Artificial Sequence
  Synthetic
SEVEEVLKRNEKTLKEIEERAREVEETVRELSERIRKRNEEVNRELEERSKRIRRDV

SEQ ID NO: 18496 - protein, 59 aa, Artificial Sequence
  Synthetic
KEARDRADELLKRNREVLERLRKRIEDLHRDNKRVLDELRRSNEETNRRNRKLLEELRK

SEQ ID NO: 18497 - protein, 57 aa, Artificial Sequence
  Synthetic
REVEEVLKENEKTLREIERRMEEVLKRVEDLSDEVRRRVDEVLRRVEETSKEIAKRV

SEQ ID NO: 18498 - protein, 59 aa, Artificial Sequence
  Synthetic
EEARKRAKDVLDRNRDVLRRLKDAIDKLNKRNKEILDRLRRKIEDLNRRNEELLRRLEK

SEQ ID NO: 18499 - protein, 57 aa, Artificial Sequence
  Synthetic
REVEEVLDKNRKTLREIRKRAKEVLDRVEELSRRVREENERVNRELRKISEEIARKV

SEQ ID NO: 18500 - protein, 59 aa, Artificial Sequence
  Synthetic
EEMKKEADKLLKENRDVLRELERRIEELNERNRRVLKELEESNRRTNEENKRLLDELRR

SEQ ID NO: 18501 - protein, 57 aa, Artificial Sequence
  Synthetic
DEVETVLDENRRTLKRIRERVDKVLKDVEKLSREVEDEIRRVLEEVEKELKDIERDV

SEQ ID NO: 18502 - protein, 59 aa, Artificial Sequence
  Synthetic
EDAREKAKRLLEENKRVLKELEERVKRLNDKNRRILERIKKRIEDLRRRVKELLKKLRK

SEQ ID NO: 18503 - protein, 57 aa, Artificial Sequence
  Synthetic
DEVERVLEENERTLRRVREIIREVLEEVRRLSEEVKRRIDEVLKENEDTLKKIKDEV

SEQ ID NO: 18504 - protein, 59 aa, Artificial Sequence
  Synthetic
KKARDRVREVEKRNRDVLEEVKDEIRKVNKDNRDILRRIKKDVEELLKRNEKVLRETEK

SEQ ID NO: 18505 - protein, 57 aa, Artificial Sequence
  Synthetic
RELEELLKRNERTLRELAKRVKRLLEENKETVRRIEERLRRVLTEVEKISRDIRDRV

SEQ ID NO: 18506 - protein, 59 aa, Artificial Sequence
  Synthetic
EEVRERVKKVEDENRKLLERAEREIKKVAEENRRLMEKMKDDVRKANKRNKELLERRTK

SEQ ID NO: 18507 - protein, 57 aa, Artificial Sequence
  Synthetic
SEVEKVLRENEKTLREIEREIDRVLRDNERTLKEVRERNEEVNRRVEEDSKRVKDEV

SEQ ID NO: 18508 - protein, 59 aa, Artificial Sequence
  Synthetic
EKARERIKRILDENRKVLREIERKIREVLERNKKVLEEVRKSNEETNDRNRKLLEELRR

SEQ ID NO: 18509 - protein, 60 aa, Artificial Sequence
  Synthetic
SVDERVEDLRRDVERVLRELRKSNEESIRRSEEIVTRLEEELKRNSKEVEEVLKRLEDEL

SEQ ID NO: 18510 - protein, 59 aa, Artificial Sequence
  Synthetic
SKDLEKALRDVEKLIREIRERNKEMLRRSEEILKEIEKRARDMSRESKRLIEDIERRTK

SEQ ID NO: 18511 - protein, 60 aa, Artificial Sequence
  Synthetic
SVEEKVDRLKRRVEEVLKELKKSNEDNTREVREALKRLKKAIEESIDRSRKILEDLRRKL

SEQ ID NO: 18512 - protein, 59 aa, Artificial Sequence
  Synthetic
DEDLERALKEVEELIRRIREENKEMSERSKKIIRKIEKDVKKALDDSERVLREIAERTK

SEQ ID NO: 18513 - protein, 60 aa, Artificial Sequence
  Synthetic
DVEKKVKELLDEVRDALRRLRKSNKDNTDEVDRALRELEETNKKSIEDSRRIVEDLKRKL

SEQ ID NO: 18514 - protein, 59 aa, Artificial Sequence
  Synthetic
DREADKVLKRVKEEIERIERENRRMSEKSERLIREIRKRNKEMLDRSKKLLEDIKRRVT

SEQ ID NO: 18515 - protein, 60 aa, Artificial Sequence
  Synthetic
KEVEEILTESEDMNRKIDKLVKEILDESEEMNRRIRELVKRIVEELRELLREIRRLAEER

SEQ ID NO: 18516 - protein, 59 aa, Artificial Sequence
  Synthetic
EEVRDRLRRSHEKNKEVLDRIRKRVKESHEKNEKSLREIEETVKKLERDVERLLREIKR

SEQ ID NO: 18517 - protein, 60 aa, Artificial Sequence
  Synthetic
EEVERILKESRDANERIKKLVEDILRRSKELNERIRDEVRKILAKSEEVNRRIRRLAKER

SEQ ID NO: 18518 - protein, 59 aa, Artificial Sequence
  Synthetic
EEVKEKAKESHKENKKVLDRIKRELEKSHEENKKSLDEIRDRVRRSHEKNRKVLEEIRK

SEQ ID NO: 18519 - protein, 60 aa, Artificial Sequence
  Synthetic
EEVERILKESEDMNRRIRDLVRRIAEESDKVNREIRKLVDEIRRKLDRVLREIEDLIRKR

SEQ ID NO: 18520 - protein, 59 aa, Artificial Sequence
  Synthetic
EEVKKRAEKSHRENEKSLREIRKELEELHRKNKKSLEEIRKTLRKLEEKVRKLLEDLRR

SEQ ID NO: 18521 - protein, 60 aa, Artificial Sequence
  Synthetic
SRVEEILRESKRMNDEIREKVKKILKTSRDMNKRIEDRVREILKKSEDLNRKIRKLIDDR

SEQ ID NO: 18522 - protein, 59 aa, Artificial Sequence
  Synthetic
EEAKRELEKSHKTNEKVLRDIERRVEDSNRENEDSLRKIERAVTESHRRNEEVLERLER

SEQ ID NO: 18523 - protein, 60 aa, Artificial Sequence
  Synthetic
EEVERILEESKRLNDEIRRKVDEILRKSEEINERVRRLVEKIRTDLERVLEEIRDLADKR

SEQ ID NO: 18524 - protein, 59 aa, Artificial Sequence
  Synthetic
EEVKRRLEESHKDNDRVLKEIERRVRESLRRNRESLRRIDEKVKELERRVEKLLREIKK

SEQ ID NO: 18525 - protein, 60 aa, Artificial Sequence
  Synthetic
EEVERILDESKKMNDDIRRKVKEILDESEKLNEDIRRLVKEILEKSKRVNDRIRKLAKDR

SEQ ID NO: 18526 - protein, 59 aa, Artificial Sequence
  Synthetic
DEVRRRAEKSVRENDKSLKEIEDEVRRSVEKNEESLKRIEDEVRKSHEKNKKVLDEIKK

SEQ ID NO: 18527 - protein, 61 aa, Artificial Sequence
  Synthetic
SKAEEVLKEIRERIERIRKRAEDVLRHDEESLKRAEEVNRKMEKESRRINEEIRDRVRKEG

SEQ ID NO: 18528 - protein, 56 aa, Artificial Sequence
  Synthetic
EKDVRKVEDDIRRVIKKLKEELDRSADKSRDVVRRLRDSNKKLNDKNRRDIEEIKK

SEQ ID NO: 18529 - protein, 61 aa, Artificial Sequence
  Synthetic
DSEEEVRERIRKIIEDVKRIIEEVLRRDDKILKEIEKRNRDMLKRSKEINKEARDRVREAG

SEQ ID NO: 18530 - protein, 56 aa, Artificial Sequence
  Synthetic
DRSVRELERRIKEVIDELRELVERSKRKVDKLLKDLTRSNEKVNRENREDLERLEK

SEQ ID NO: 18531 - protein, 59 aa, Artificial Sequence
  Synthetic
DDERRAKKAAEDAAKRLKEIAEKAHRISEKALEELKRINDDANKISEDALRRLEKLKKE

SEQ ID NO: 18532 - protein, 56 aa, Artificial Sequence
  Synthetic
SEEAKELAKKIKEIADEARKRAEDNARTNKEAAERSKENADRNAEENKKAAEKAKR

SEQ ID NO: 18533 - protein, 59 aa, Artificial Sequence
  Synthetic
KDEDEVRRRVEELLKRNKELVEEIHKLSEDALRDLERINEEVNRISDEMRRRLDKLKKD

SEQ ID NO: 18534 - protein, 56 aa, Artificial Sequence
  Synthetic
SEEAKKLKERVDRSLKESEKEVRENLERNRKLLDESRRNAEENLRENKRVLDELRR

SEQ ID NO: 18535 - protein, 59 aa, Artificial Sequence
  Synthetic
SEEDEVRERVKRVLDELRKINEDLNRISREMLERNKDILRRIHEISKRALDKLKKLKED

SEQ ID NO: 18536 - protein, 56 aa, Artificial Sequence
  Synthetic
SEEVRKLLEEVKDSLRKSEENARRNLDENRRSLKKSEDEVRRNLEENEDTLRKLEK

SEQ ID NO: 18537 - protein, 59 aa, Artificial Sequence
  Synthetic
DEMDEVRRTIKKLDKDSRDKVRTVEEKIRRLDEESRRENEEIVRKIEELLEEIERRVRS

SEQ ID NO: 18538 - protein, 56 aa, Artificial Sequence
  Synthetic
EKEVKKIKEESDESLKEIEKLLREIEEESKRSLREMEKTLEDIERRVRRVLEEIKR

SEQ ID NO: 18539 - protein, 60 aa, Artificial Sequence
  Synthetic
SIEELAKRNEEENEKAAEDVERLAEEVKERAERVARESEKLAREAEKEAERVAREIRRDR

SEQ ID NO: 18540 - protein, 59 aa, Artificial Sequence
  Synthetic
EEAAKRASEENRKAVRDAREKARRAAEEAKKLLDEARKHSEEAAKRAKELLEEAKKRAD

SEQ ID NO: 18541 - protein, 60 aa, Artificial Sequence
  Synthetic
KIEELMKRNEKENREVLERVKELADRNRRENEEVVKKSKKELDDLKRKIEEVLERIKRER

SEQ ID NO: 18542 - protein, 59 aa, Artificial Sequence
  Synthetic
EEVVEKVSRENKKLVADIEDEVRRASTRNKKLVKDIEKHSEDVVRELEKLLKDIKDKVD

SEQ ID NO: 18543 - protein, 60 aa, Artificial Sequence
  Synthetic
SIEDEARRNEKRNREVLKRSKDLLDEIARKIEEVEKRIRDLVKRVKEEIDEVLRRIKRER

SEQ ID NO: 18544 - protein, 59 aa, Artificial Sequence
  Synthetic
DELLRRVSKENEDLVREIEDHTRRVLETIERKLRRVEEKVETVVREIKRRLEDIERRVK

SEQ ID NO: 18545 - protein, 59 aa, Artificial Sequence
  Synthetic
EEVDRVIERIKRLLEEVERKIRRASEKNRRLIEKSRKELEKVSKENKDLIDRVRELRDA

SEQ ID NO: 18546 - protein, 55 aa, Artificial Sequence
  Synthetic
EKVKTVEKEIREVIERADEIIERNERENKKSVEEIEEILERNKRRNEEALREVDK

SEQ ID NO: 18547 - protein, 57 aa, Artificial Sequence
  Synthetic
DELDRAIEEVKRLLDEIRRRLEKVVREVRKLNEEIREDLRRVVEEVRRTNKEIRDRV

SEQ ID NO: 18548 - protein, 56 aa, Artificial Sequence
  Synthetic
SDKVRRLEREVEELLKTVEELIRRLEEHTRRVLKEVDEEIKRLKEHTEKVLRDVEK

SEQ ID NO: 18549 - protein, 59 aa, Artificial Sequence
  Synthetic
SAEELVKELERRIEELLKELEEIVRRNRKHSEDVLRKIKELVRDVLRRVKEALKDLTKK

SEQ ID NO: 18550 - protein, 59 aa, Artificial Sequence
  Synthetic
EDVVRKLIKEIDDRLKEVKKEVEKLSDENRRLNEDVERRIKELLDDIERLLKEIRDTVT

SEQ ID NO: 18551 - protein, 59 aa, Artificial Sequence
  Synthetic
DVEDIVRRIRERVKEALERLRKTNDDNRKHSEEVLRKLAESDKRTMERIERVLEELRRR

SEQ ID NO: 18552 - protein, 59 aa, Artificial Sequence
  Synthetic
KEVVREMKRKIEELLKRIEDENKRLSDENRELNKRVEEDNRRLNKEIEDELRKVEEDVK

SEQ ID NO: 18553 - protein, 59 aa, Artificial Sequence
  Synthetic
DLEELVKELEKRIEDVLRTLRKTNKDNEKAVEESLRKLEDELRKLKEKIDRLLDKLTKE

SEQ ID NO: 18554 - protein, 59 aa, Artificial Sequence
  Synthetic
EEVVRRIIEDIRRLLEEVKKVNEDLSEENERLNRDAERRVREAIKEVEDLLDEIEKTVR

SEQ ID NO: 18555 - protein, 59 aa, Artificial Sequence
  Synthetic
SVEDELRKLEEKIRRLLEELRRTNDENRRHSEKVLEELRRELEKLKRRIEELLRKLREE

SEQ ID NO: 18556 - protein, 59 aa, Artificial Sequence
  Synthetic
EEVVERLIRDVERKLREVKKENDRASKENEDLNREVKRRAEKLLRDVERLLREVEKTVK

SEQ ID NO: 18557 - protein, 59 aa, Artificial Sequence
  Synthetic
SAEDRLRELEERIRRALKELEDTNRRNEEHSKKLLEELARSDRETEEEIKEALKRLTER

SEQ ID NO: 18558 - protein, 59 aa, Artificial Sequence
  Synthetic
EEVVDRLIREVEERLRDVRRLNEELSKRNKELNDRVREVNEELNRRIKKRLEEIKRRVE

SEQ ID NO: 18559 - protein, 59 aa, Artificial Sequence
  Synthetic
SLEDLVRTIREEIERLMKEAEDTNRRNKEESEESLRRLKKLVEDIDREVKEVLDRAEKN

SEQ ID NO: 18560 - protein, 59 aa, Artificial Sequence
  Synthetic
EKVVEELIRRIKDELKKIRERNKELSDRDKKLNEDVEREVRKLIDEIRKKLEDVERTVK

SEQ ID NO: 18561 - protein, 60 aa, Artificial Sequence
  Synthetic
REVDKVREDVKRLIKEIEDRVRKVLKEDEDLIRELRERVKKVSKENKEVVKTLRELVRDL

SEQ ID NO: 18562 - protein, 55 aa, Artificial Sequence
  Synthetic
ELVKELEKRIREVLERLRRLIERSKEEIDRVLREVEEDVRRNKEENKRLLEEAER

SEQ ID NO: 18563 - protein, 59 aa, Artificial Sequence
  Synthetic
DEKDKVRKTVEDILREIEKIVEDLVRRNERVDREIRERVRELLRRDDEILKRMEEVKRR

SEQ ID NO: 18564 - protein, 56 aa, Artificial Sequence
  Synthetic
EREVTKLKEDIDRLLEKLERDLDELRKRNDELLKELEDRVRKSKEKVEKILRDVRR

SEQ ID NO: 18565 - protein, 60 aa, Artificial Sequence
  Synthetic
SIEDKLRELKERHKELSKRIKEELERLTEEHRRVSEKIRKSLEEDKRRADKVLERIRRER

SEQ ID NO: 18566 - protein, 59 aa, Artificial Sequence
  Synthetic
EDVLRKVEEDSREVLKDSKRLLDEVATRSEEMLRRSEELLKRIHETSKKVLDEIKTKLK

SEQ ID NO: 18567 - protein, 60 aa, Artificial Sequence
  Synthetic
SIEDLARDLERRHKELSEDDKRKLDELRKRHKDVSDEARRSLERDERRVEKVEREITKRR

SEQ ID NO: 18568 - protein, 59 aa, Artificial Sequence
  Synthetic
EKVLDDVRRRSDKMLEDSRRLTREVEETSKEMLERSRRLLEEIHKESDRVLREARERDR

SEQ ID NO: 18569 - protein, 56 aa, Artificial Sequence
  Synthetic
RIEDILRRLEEHHRRLDKENKEILERLKKHHEEVLRKIKEILERLEREARDIERKI

SEQ ID NO: 18570 - protein, 59 aa, Artificial Sequence
  Synthetic
DEVVEKVVREVEDTNEKIRRRSDEVRKEVEDTNRRIDKRLKEVEEEVRRLLDEVRKESE

SEQ ID NO: 18571 - protein, 60 aa, Artificial Sequence
  Synthetic
SELEDVAKKAEDLLTKSAEILKEVVDRHRRLNERSEDEARRVEEEHRRTNKKLLDLARRG

SEQ ID NO: 18572 - protein, 56 aa, Artificial Sequence
  Synthetic
SEELRKLKKRIEDISREHERILRELREHVERVSDKHRKILKELEEDVERILREVTK

SEQ ID NO: 18573 - protein, 60 aa, Artificial Sequence
  Synthetic
SEIEKVVEDIKRLLEESKDRLRKAEEEVRDLSRRSREKLRRAEEDIKRLLDEIERMLRAG

SEQ ID NO: 18574 - protein, 56 aa, Artificial Sequence
  Synthetic
SDELRKLAEEIERVSEEHKRILDELRDHLRKNTKDVRDILRELEKEAERLLRELRR

SEQ ID NO: 18575 - protein, 60 aa, Artificial Sequence
  Synthetic
KDVEDVLKRVKDVNREVEKRLEKVIRDDEKINEEINRRLDEMAERVKRVNETVEDIARKE

SEQ ID NO: 18576 - protein, 56 aa, Artificial Sequence
  Synthetic
EKLVEELRRESDTSKKRVEKLIRELKEKNKRSEERARRIIEKLKKESKDSLKRVKD

SEQ ID NO: 18577 - protein, 56 aa, Artificial Sequence
  Synthetic
EEKEILDELEKEVRDLNRKNKEILRRLEETARDLHRRNEEILDRIRKRVEELKRRV

SEQ ID NO: 18578 - protein, 56 aa, Artificial Sequence
  Synthetic
KDTVAKEAKRLIRDLERLSREIEERVRRLIEEVKEESERIRERVTRLIKEVEDRRK

SEQ ID NO: 18579 - protein, 56 aa, Artificial Sequence
  Synthetic
DDEEILKELEERVKKLHEKNKRILEKLKREVERLNDENRRILKEVKEDVDRLLKEV

SEQ ID NO: 18580 - protein, 56 aa, Artificial Sequence
  Synthetic
SETVARRVEEMIKEVEELSKEIEERAKRLIDRLRELSKRILEELKRLLEEVREKRR

SEQ ID NO: 18581 - protein, 59 aa, Artificial Sequence
  Synthetic
REEDEVLEDARRLSEESRKKLREVERRAKELSDRSRKRLRDVKRRVDDALRKIEDLRRR

SEQ ID NO: 18582 - protein, 56 aa, Artificial Sequence
  Synthetic
SEKLRELEEEIRRNSKDVKEVMKELDKHIKRNSEEVDKVLKELEERLKRLLDRVRK

SEQ ID NO: 18583 - protein, 59 aa, Artificial Sequence
  Synthetic
SDEDRVKDKAEELSRRSREELERVKEEAKRLSDESKKRLEEVTRRIEKVLREIRELRER

SEQ ID NO: 18584 - protein, 56 aa, Artificial Sequence
  Synthetic
SEKLRRLREEIKKNSDEVKKVLRRLEENLRDNTRRVREVLERLEDEARKLLKDVKK

SEQ ID NO: 18585 - protein, 59 aa, Artificial Sequence
  Synthetic
SEVDDVLRRLKELSERSEKTLEDIRDEAEKLSKESEDLLREVLRRSEKVNEDIRRLREK

SEQ ID NO: 18586 - protein, 56 aa, Artificial Sequence
  Synthetic
SRRLEKLRREIEDNSRRVREVLKRLKENIKRNTDRVREALKRLEREHEEVLREVET

SEQ ID NO: 18587 - protein, 60 aa, Artificial Sequence
  Synthetic
SIEEAITRLRKEVEDSNKRSEDVIRELHERDKESLEEVREIIKRLKDKVRTLLEEVDKRV

SEQ ID NO: 18588 - protein, 59 aa, Artificial Sequence
  Synthetic
EEILKEVLKRLRKLLEDNERVLDEARRRVEKTNEEIKEVLKRVAEEVDRLIKEVREEVE

SEQ ID NO: 18589 - protein, 59 aa, Artificial Sequence
  Synthetic
SIDEIIEELRRRIEELRKEAEKIIRDSKKHLEDNKRDADRVIKESKEEVDKLLKEIEEA

SEQ ID NO: 18590 - protein, 59 aa, Artificial Sequence
  Synthetic
EELLEEVRKRIEDLLRELRDILRKLLERDKRLSKESERLVREMLREDRRLLDELRKEVK

SEQ ID NO: 18591 - protein, 59 aa, Artificial Sequence
  Synthetic
SIEEIIRDLRRHIKENAEEAEKVIKESEDHLRENKKRAEDVIRRLEEELRKLAERVRRA

SEQ ID NO: 18592 - protein, 59 aa, Artificial Sequence
  Synthetic
EELLKRAVDAVRKLSEDSKRLVEEALRRDEELSKRSRDLVEEVRRRAEELLRRIEETVK

SEQ ID NO: 18593 - protein, 59 aa, Artificial Sequence
  Synthetic
SSKDDVRRRMKEINERDKRLLDEVLRRLEKLIEELKRHTEEVERDADRIIEEIERMLRN

SEQ ID NO: 18594 - protein, 55 aa, Artificial Sequence
  Synthetic
ERIIKEIRDLIRENEERNKEIVRRIEELLRELEKRSRDVIKRIREKLDRLRKRVE

SEQ ID NO: 18595 - protein, 57 aa, Artificial Sequence
  Synthetic
SKVEEIERRIREEVTRSEKEDRDNVREIRKLVEELRRESKRILDESRRLVKRLIDEA

SEQ ID NO: 18596 - protein, 59 aa, Artificial Sequence
  Synthetic
DEILKRIEEEVRKILEDSRRSTEESHEKVRRIITKIRKLLEDDERRNRKVVREAEEAMR

SEQ ID NO: 18597 - protein, 57 aa, Artificial Sequence
  Synthetic
SKLEELLRRAREVARRLKEELERILKEVEDRVRKSEKEDEDNVKRITDEMRKLKERV

SEQ ID NO: 18598 - protein, 59 aa, Artificial Sequence
  Synthetic
DRVIKRIEEDVRRVIEEIKRLLRELEEEIRRILDESRESTERSHRTARKIVEEVERAAK

SEQ ID NO: 18599 - protein, 59 aa, Artificial Sequence
  Synthetic
SKMETIERRVEEAIRESEELNERDEERVKKVIDELKKLIDDIRRRLEEALRELKKVTDD

SEQ ID NO: 18600 - protein, 55 aa, Artificial Sequence
  Synthetic
EEILKKVRELIEETKRRTDDLHKKVKERVDDIKRRLDELLEEAKRALDEIRERVK

SEQ ID NO: 18601 - protein, 60 aa, Artificial Sequence
  Synthetic
SAVEEIKRRLEEIIRDLERLIDDDRKRVEEMVKRIEDLIKKDEEDVREALKKLEEVVTRG

SEQ ID NO: 18602 - protein, 55 aa, Artificial Sequence
  Synthetic
EEILERADRLVKEIKEKLDRLVKTSEELIRRLEEELRRLHEKVKELMKRAEEKVR

SEQ ID NO: 18603 - protein, 60 aa, Artificial Sequence
  Synthetic
SREDVLREIRRLVEETKKENEKILERLRRLVRTVERRNDEVVKKVRTLVKRLEEEIDKTV

SEQ ID NO: 18604 - protein, 56 aa, Artificial Sequence
  Synthetic
LDELLRKLKEDLDRSKEELKEIEKRVRELLERNKRKTEEVEKEVKRDLDDIRRKLK

SEQ ID NO: 18605 - protein, 60 aa, Artificial Sequence
  Synthetic
SEKEALDEVRKRVEDVRRDNKRILEESERLNRESRKRNRDILERLRKEAEDLKREIDETV

SEQ ID NO: 18606 - protein, 56 aa, Artificial Sequence
  Synthetic
LDKLLEDLERLLKENLDRLRKILEEDRRLNKENNDKLKEIEKRVRELLKDIKDKLK

SEQ ID NO: 18607 - protein, 60 aa, Artificial Sequence
  Synthetic
KEVEDVLRKIRDLVRKNLEDAERVVEEAKRLIDENRERLREVLREDEELNREILKRLREL

SEQ ID NO: 18608 - protein, 56 aa, Artificial Sequence
  Synthetic
EEALKEVRRLIDELRKANKRILEEIRDLVRRLREENEEILRRLKRKNERTADEIRK

SEQ ID NO: 18609 - protein, 60 aa, Artificial Sequence
  Synthetic
SEVEDVLRRIRELLEEIKRRLEDVRRRIKELLDRNRRESEDVLRRDKELNDEVRDKLRKR

SEQ ID NO: 18610 - protein, 56 aa, Artificial Sequence
  Synthetic
ERMLKTVEDLVREVSKEVRRILEELRDEVRKSEEENRRILDKLEKENRKTAEDVKR

SEQ ID NO: 18611 - protein, 60 aa, Artificial Sequence
  Synthetic
SEVEEVLRRIKELLDRNREELKKVRERIKRLLDRNREKSEEVRERDKRLNDEIKKRLDED

SEQ ID NO: 18612 - protein, 56 aa, Artificial Sequence
  Synthetic
KRVLEEARRLVKKSEEDNRRILKELRELVKESERENEEILRELKKLNEDTKKRIED

SEQ ID NO: 18613 - protein, 58 aa, Artificial Sequence
  Synthetic
DEVEEVLRKIEELIRENIKRAREVLEEDKRLNERNKRESEKVLEEDERLNREIEKELR

SEQ ID NO: 18614 - protein, 56 aa, Artificial Sequence
  Synthetic
EEVLRRIKKLIEESMEDNERILRDAERLNRESKERNERILKRLKKRNDETRKEVEK

SEQ ID NO: 18615 - protein, 59 aa, Artificial Sequence
  Synthetic
SSAEEVKERSKRINEEIEKTLEKMLRESRRTNEEIKKTLKRLAEEAEKLLRDVERLVRA

SEQ ID NO: 18616 - protein, 56 aa, Artificial Sequence
  Synthetic
EDIIREIRELNKRTRDKIEEIIERIRKLNKETRDRIRKIMREIEKKIRDLAEEIRR

SEQ ID NO: 18617 - protein, 59 aa, Artificial Sequence
  Synthetic
KSMEEARKKSKEINDRILDRLKKVLEESRKINKDIKDTVERLRERSEDINRRIKELVDS

SEQ ID NO: 18618 - protein, 56 aa, Artificial Sequence
  Synthetic
EEIIKEIRKLNEETRKEIERIAREAEELNKRTADKIETIIREIEKLNKKLKDDIEK

SEQ ID NO: 18619 - protein, 60 aa, Artificial Sequence
  Synthetic
DEVRELVKEIEELIERIERTLRKMTKDSRDLNRKINEKLKKVLEDSRRLNEEIKRTIDSN

SEQ ID NO: 18620 - protein, 56 aa, Artificial Sequence
  Synthetic
ESILRRLEKLLEELRKRVEDIIRELEKLNKESREEIDKIIREAERLTEETERRARK

SEQ ID NO: 18621 - protein, 60 aa, Artificial Sequence
  Synthetic
DEMEELLERIRRLIREIDERLKEMLKRSRELNRELNERNKDVLRRIKELIDRIRRLIERD

SEQ ID NO: 18622 - protein, 56 aa, Artificial Sequence
  Synthetic
ERILRELKKLVDDLRRRIKKILDESKELLERSEKKADESNKELRKLVEELRKEADD

SEQ ID NO: 18623 - protein, 60 aa, Artificial Sequence
  Synthetic
SRVEEIERRIRELIKRIEDRNRKMLETSRRLNEDINRRLRELLERIRKLIEEIEELIKRD

SEQ ID NO: 18624 - protein, 56 aa, Artificial Sequence
  Synthetic
EKILRDLEELLKELARRLERSNEESRRLLEDSRRKMEKIIRELEKLLDDLRRKIEK

SEQ ID NO: 18625 - protein, 60 aa, Artificial Sequence
  Synthetic
DEKEIDEEIERLVRDSKRRSRKVLRDIEELAKRVKEENDRVLEKLRKLIEDLKRKIDETI

SEQ ID NO: 18626 - protein, 55 aa, Artificial Sequence
  Synthetic
ERLKEEVDRVIADSRRLNKEILDEVKRELDKLRKHLEDVLRRAEKMIRDIDEELR

SEQ ID NO: 18627 - protein, 59 aa, Artificial Sequence
  Synthetic
SEVDKVREDVERLSARSEEKVREVLERVKRLLDKSKRDNEDVKRRVRELAERLRDLRRK

SEQ ID NO: 18628 - protein, 56 aa, Artificial Sequence
  Synthetic
KEVLDRIRRRIEENSKKIDDMVKKVRTLVKRSEEESERVLKELRDLMRDVERRIRE

SEQ ID NO: 18629 - protein, 60 aa, Artificial Sequence
  Synthetic
SEVERVEKEIRDLSRKSNEDLKRILDEARELSKKSNEDTKRVLKETRDLLKEIADRLREV

SEQ ID NO: 18630 - protein, 55 aa, Artificial Sequence
  Synthetic
EEVKKRVEESLRENEKLLRTIAKEIEDLVRENRKVNEDVNREVEKLVRELEERIK

SEQ ID NO: 18631 - protein, 61 aa, Artificial Sequence
  Synthetic
REVEELLKRIRELVKRNNEKTKRLLDESRRLNEEANRRLDKVLKELRDLAKRIKEELDEKG

SEQ ID NO: 18632 - protein, 55 aa, Artificial Sequence
  Synthetic
EDLEREVKKLLDENRESSERVIRESEKSLRDHAERTRKVREEIRKLLEELKRAVE

SEQ ID NO: 18633 - protein, 56 aa, Artificial Sequence
  Synthetic
SEKEDIKRKLDDLLRRHREVSRESNRELKRLLEEHRRTSKRLDDEIKRLLREIEEA

SEQ ID NO: 18634 - protein, 56 aa, Artificial Sequence
  Synthetic
TETVRKEIEDIARRSKEKLEKNTRDVKRMVDRSKEELKRILKELEDAIREIKKKVD

SEQ ID NO: 18635 - protein, 60 aa, Artificial Sequence
  Synthetic
SEKERILERLKELVERSNEKLERILRRSEKLFTDSNKELKDILDRARKLIEEIDDRIRKV

SEQ ID NO: 18636 - protein, 55 aa, Artificial Sequence
  Synthetic
KKIRDDAERLITENKERNERVNKRDEDLLRRNRKENEELNRELERLVKEIREKLK

SEQ ID NO: 18637 - protein, 60 aa, Artificial Sequence
  Synthetic
EEKERILETAKKLAEEIKRRAEEILKRSEELVRDSNKKLREVLEEARRLIKKIEDEIREI

SEQ ID NO: 18638 - protein, 55 aa, Artificial Sequence
  Synthetic
KEIEDEVRRLVREIEELLRDIERRDKELLDENRKLNEEVNRDAERLVRKIRKALE

SEQ ID NO: 18639 - protein, 60 aa, Artificial Sequence
  Synthetic
SEVEELLRRIRELSKRSKDEIKRMLKEIRELSEKSKRDIERMLRRNEDLARKIKELIDRD

SEQ ID NO: 18640 - protein, 55 aa, Artificial Sequence
  Synthetic
EEIKREVEKLLEENRKLLEDLEEDVKRLIEENKRALEEVERESKRLNDESRERTK

SEQ ID NO: 18641 - protein, 57 aa, Artificial Sequence
  Synthetic
DDLERVLKEIKKAADKIREDNKRTADKIRKRVKELDDETRDMLRRIRKLVKEIKERV

SEQ ID NO: 18642 - protein, 59 aa, Artificial Sequence
  Synthetic
DEALRRVEEEVERLIRDLRRVLKETSDRVRELIDKHRRLSEEVEKDVKRLIDELKKKTD

SEQ ID NO: 18643 - protein, 61 aa, Artificial Sequence
  Synthetic
SEIEEILERIKKISEDSKRRLEDILRKAKKISDESRETNKKTLEDVRRIADEIRKRLEEAG

SEQ ID NO: 18644 - protein, 59 aa, Artificial Sequence
  Synthetic
KDKLERVEREIRRLIKENKDIVERIERAIEELVRRNEKSVEDSKKDIKRLVDELDREAR

SEQ ID NO: 18645 - protein, 57 aa, Artificial Sequence
  Synthetic
SEVERIKERIDKLVEENRKLVEEIEEEDRRLLEENREIVKRIEEEIEKLLRDLERRV

SEQ ID NO: 18646 - protein, 59 aa, Artificial Sequence
  Synthetic
EDVLRDILREIERLSKESKDRLKDLLRKSEELSKESKKLLKDILKKVEDLIREAREEAR

SEQ ID NO: 18647 - protein, 60 aa, Artificial Sequence
  Synthetic
EEKERLKKSLEDLAKRIRDILRKHEEDSRRLSKEIRDVLRRHREASRKLVEEIKELIKSV

SEQ ID NO: 18648 - protein, 59 aa, Artificial Sequence
  Synthetic
EEMLKRVLEELERIVRDIERRIKEASERIRKIVEDIKKRIKEADDRIKDIVREIAERIR

SEQ ID NO: 18649 - protein, 60 aa, Artificial Sequence
  Synthetic
DEEEEALKDVERLLRRNEKLIEEHERRSEKLLRELEDVVRRHEERSKELLERIRERIKRL

SEQ ID NO: 18650 - protein, 55 aa, Artificial Sequence
  Synthetic
EEVLKKLRKLSKESEDDIRKMSEEVEEIVRRIKRLLEEATRKLEELVKRIEERID

SEQ ID NO: 18651 - protein, 60 aa, Artificial Sequence
  Synthetic
DEDEEAKREVERLLRENEKLIEDHKRLSEELVRRLEDLIRRHEETSERLLRELREIIKRQ

SEQ ID NO: 18652 - protein, 55 aa, Artificial Sequence
  Synthetic
EDVLRELRDLSRRSKEEIKKMSEEIEKLARDILKRIREMTEEAKRIVKEIKDRIR

SEQ ID NO: 18653 - protein, 61 aa, Artificial Sequence
  Synthetic
SEIERVLKELDEVSKKSLEEIRRMSEESRRLSKESIDRIREMLERAREKADRIRETIKREG

SEQ ID NO: 18654 - protein, 59 aa, Artificial Sequence
  Synthetic
KDKLRRLRERVEELKKRNEDLLKEHRDENKRLIDENRDLVDKLRKTIKRLIDDLERRVR

SEQ ID NO: 18655 - protein, 60 aa, Artificial Sequence
  Synthetic
SKVDELRKTVEKLLRELRDSLRRYEEESKRLLEELDDSLRRSKKTVEDLLREIKEILKRV

SEQ ID NO: 18656 - protein, 55 aa, Artificial Sequence
  Synthetic
DRAKERLERLVRKIKEDNKRSLTENERLVRKIKKENEDAIRRLKDVAKKIKEELT

SEQ ID NO: 18657 - protein, 57 aa, Artificial Sequence
  Synthetic
SEKEELKKEIRRNLEENKDVLRRHEEENRRLKKRIKELLERHARTNKRLKEEIDRTI

SEQ ID NO: 18658 - protein, 59 aa, Artificial Sequence
  Synthetic
SRLLEELLRKLEKLSRDSKEKLKEISKRSKELVKRIERELEKMTKKSRDLVKKIKEEEK

SEQ ID NO: 18659 - protein, 60 aa, Artificial Sequence
  Synthetic
SEVEELRKELERIVKETKDVAEELSRESEEVLKKSEENLRRLTEKSDDVLRRVAELIRSN

SEQ ID NO: 18660 - protein, 55 aa, Artificial Sequence
  Synthetic
KELKERIERVNREVREEARKHHDKNRDIRRRVTELHKRHKERNEEIRRKVEEDAK

SEQ ID NO: 18661 - protein, 60 aa, Artificial Sequence
  Synthetic
DEIEDLRRKVEKVVRDAEKVLRDLSRKSRKVHEDSRENVDRLLKEVEDVVKRVADLIRSN

SEQ ID NO: 18662 - protein, 55 aa, Artificial Sequence
  Synthetic
EELKRTLEELLKRVEDLVRRHHEENKKLTDDNRRLHRRLRERLKEVLREVERRRD

SEQ ID NO: 18663 - protein, 60 aa, Artificial Sequence
  Synthetic
SDVERIEEELRKLTEENRKLTETLKTELRKIRREVEKILKELEDRLRELSERVKDLIRKR

SEQ ID NO: 18664 - protein, 59 aa, Artificial Sequence
  Synthetic
KEVLDDIRRKLKKLHDESKKTHRDILERLKEALKRLLELAERVLEELERRAEELRREIK

SEQ ID NO: 18665 - protein, 60 aa, Artificial Sequence
  Synthetic
DDVERLEERLKELDKRNKELTKDLEDKLRKLTRDNRELLKKIEKRLEEVRREVKRLITER

SEQ ID NO: 18666 - protein, 59 aa, Artificial Sequence
  Synthetic
KEVAERIREELERLHEESKRLHEKILEDLERAHDETRRIVEDILRRLEKVARELKEEIR

SEQ ID NO: 18667 - protein, 57 aa, Artificial Sequence
  Synthetic
DELRELIKTLREILERLLDRSRRLNDKLKEILERIERASKKMNDDDRRRVRRLEEEV

SEQ ID NO: 18668 - protein, 59 aa, Artificial Sequence
  Synthetic
SRRLEDVERVVEEAKRALERSLRENEKSVEDIKKRIRESVEENKKSVRDTLERLKRTLE

SEQ ID NO: 18669 - protein, 57 aa, Artificial Sequence
  Synthetic
STEEEVRKRVEEIERTLRESLERNRETVERSEERLEELLRRARRVVEESKKRLDKEI

SEQ ID NO: 18670 - protein, 59 aa, Artificial Sequence
  Synthetic
DEVMRDLIRKLEDILRRLKEESDRLNEEHKEILKELVRRLEEIIKEHREIVERILKKTR

SEQ ID NO: 18671 - protein, 56 aa, Artificial Sequence
  Synthetic
DEEEEVKRLLDRIREEVKRLHDENKKRLDELRRTVDKLLRESERENKRVNDEVRKD

SEQ ID NO: 18672 - protein, 56 aa, Artificial Sequence
  Synthetic
VETLKRRIEDVLRRVEEESRRLNKELEDVLRRAKELVDRSKKKLEEVLRRVKEKAK

SEQ ID NO: 18673 - protein, 56 aa, Artificial Sequence
  Synthetic
DEEREIEELLRTLTREVKRLLDESRKLNEEILRKVKRLHDENRKRIREVLEDVKRR

SEQ ID NO: 18674 - protein, 56 aa, Artificial Sequence
  Synthetic
VETLKEEVKRALEEVEKRVRDSKRDLKRVAEEVEETSRRLNDELRKVREDVRRRAT

SEQ ID NO: 18675 - protein, 61 aa, Artificial Sequence
  Synthetic
EEAERIADEARKVEEDVRRMVEESKRKLKKVLDDSKRLIDELKRRLEDIRRKVAEMAKRLR

SEQ ID NO: 18676 - protein, 59 aa, Artificial Sequence
  Synthetic
ERVLRDIERLLEEIRRELERLARESEKVNERVNREDRRLLEEIRELLERIRKELEERTR

SEQ ID NO: 18677 - protein, 56 aa, Artificial Sequence
  Synthetic
SLKEEVDELLRRIEEEIRRLADKSRRTNERVKEEIDRLARESEETNKKLKKKIEDI

SEQ ID NO: 18678 - protein, 59 aa, Artificial Sequence
  Synthetic
AKIVKKLLEDLKRLLKEVKELMERINKETKELLERVAREVKRLNTDTERLLKEVEDRVR

SEQ ID NO: 18679 - protein, 60 aa, Artificial Sequence
  Synthetic
SEREEIEELSRRSRRSLEELKKEIRKVNERNKRLLEELEREIRRVSKESRDRLRELRRRL

SEQ ID NO: 18680 - protein, 56 aa, Artificial Sequence
  Synthetic
TKDLIRRLRELTRTIERRATELIKRLEEVSREIAERVRKLIKELRDMTRKIDEDAR

SEQ ID NO: 18681 - protein, 59 aa, Artificial Sequence
  Synthetic
SEVEKLLERLKKILEEIARLVDRSNTEDDKILRKAEEDVRRLLDKLKKILERAAELLAR

SEQ ID NO: 18682 - protein, 59 aa, Artificial Sequence
  Synthetic
EKLRREIRKLVKELKETIKRLEKKSRDTVKRTEDELRRLEEEAERLITELKERLDELRK

SEQ ID NO: 18683 - protein, 60 aa, Artificial Sequence
  Synthetic
REDEEMLKDLKRVLEDAERVSRDTLRELEDAVRRLHELSEDTLDKLRKVLEEADRLIRSN

SEQ ID NO: 18684 - protein, 55 aa, Artificial Sequence
  Synthetic
EDVRRILERVRKELKRLLEENEKLLRRVEKELEENERRNEEEIRRVKKTVEERAK

SEQ ID NO: 18685 - protein, 59 aa, Artificial Sequence
  Synthetic
SRVEEVLKENRDTNEELKDTVRKILETNRRTLERAEEEVRKILEDLRDIARKIEEMVEN

SEQ ID NO: 18686 - protein, 59 aa, Artificial Sequence
  Synthetic
KEMLERLRRSLEESKETVKRLLEELRKSLEKSKRDVERLLKELEDLLRELEKKVDDRRR

SEQ ID NO: 18687 - protein, 59 aa, Artificial Sequence
  Synthetic
DEAREILTRIRKLLEEIRKEAEEVSERHKRLVDELDKEVKDINKRAEDLLRELAEIVKR

SEQ ID NO: 18688 - protein, 56 aa, Artificial Sequence
  Synthetic
EKEVRKVLEEIKRVLEELKRHAEDNLRRAREVLKKLADEAKRVNERSEELLRELKK

SEQ ID NO: 18689 - protein, 60 aa, Artificial Sequence
  Synthetic
SMADEILRELKELTEEIERRVREASREHRERLEKLRREVREINKELKRRLDELREIVERG

SEQ ID NO: 18690 - protein, 56 aa, Artificial Sequence
  Synthetic
KDRVEKILRENKERTDRLRRHIEKNLEDARDLLRKLKEEVKRVNEESEKSLRDLRK

SEQ ID NO: 18691 - protein, 60 aa, Artificial Sequence
  Synthetic
SLEEDIRRILDENRRSTERIKEEIREINERDKRSLEDIERRIRKVLEDLRKLLEDLAREG

SEQ ID NO: 18692 - protein, 59 aa, Artificial Sequence
  Synthetic
EEAVRKILKEVRDVNEELKRRVEKILEDIRDANRRLRETVEEIIRRAKEAVDKLRDEVR

SEQ ID NO: 18693 - protein, 59 aa, Artificial Sequence
  Synthetic
SEKERVDDLLRRVDELLKRSKREVEKLLEDNKRLLERIERENRRLTKELEDKVRRLKEK

SEQ ID NO: 18694 - protein, 56 aa, Artificial Sequence
  Synthetic
VEEIAKEIRDVLREHKELIDEIRKKAKKISDKSRKLMEELERHLRRVIKELDEKAR

SEQ ID NO: 18695 - protein, 60 aa, Artificial Sequence
  Synthetic
SEEEEVEELLRRNRKKAEEVDREIDRLLKEVEKLVKDSRKRIEDLLRRAREKVEDLRRKG

SEQ ID NO: 18696 - protein, 56 aa, Artificial Sequence
  Synthetic
VREISEEIERITRETEDRIRKIAEEIRRVLKRHKELIEELEKEIRDVLKKLDDDVR

SEQ ID NO: 18697 - protein, 57 aa, Artificial Sequence
  Synthetic
SEIEKLLKDLRDLLKKSEETVREMLKRLEEIVRRAEEDHKRLLEKLKRLLEKLRRDV

SEQ ID NO: 18698 - protein, 59 aa, Artificial Sequence
  Synthetic
EEVRKRLEDLADEVDKRNRDIERKIRELMKRAKEVSERLNKELEDLAREAEKLLRELKK

SEQ ID NO: 18699 - protein, 57 aa, Artificial Sequence
  Synthetic
DEIEELLKRLRDIVRKIREDHERLSRESERINKDARRRHDEMLRRLEELLRKVEKEV

SEQ ID NO: 18700 - protein, 59 aa, Artificial Sequence
  Synthetic
EKVKRDIERIRKEVKEESKRLNDHIRDNERRNKESSEELNRRIKKIADEVRELLEKLKT

SEQ ID NO: 18701 - protein, 56 aa, Artificial Sequence
  Synthetic
REEERLRELMDESRKRIEAVEKRARDLKRKSDRLIEDAARKIKTILDKIRKLIEDL

SEQ ID NO: 18702 - protein, 56 aa, Artificial Sequence
  Synthetic
LKDVEKKIREVNKTVKEEVDRLVEKNERLNDEARRVVKELLDKVERMLEEVEREAR

SEQ ID NO: 18703 - protein, 60 aa, Artificial Sequence
  Synthetic
SEKEDMARKIKELIDRDRERIERVIREIEKLIKELRDHNKRVLETDKRLLDDLKRVADDG

SEQ ID NO: 18704 - protein, 55 aa, Artificial Sequence
  Synthetic
EDLRRLKEEVDRVAEETRRLLEEIKKKVDKVVREVETSNRRSEEEVRRLLDEIRR

SEQ ID NO: 18705 - protein, 60 aa, Artificial Sequence
  Synthetic
DEKEEAARRVEKLITELRKHNEDVLRDIKRLIDELRRHNEEVLKRDRELLERLRKVAEEG

SEQ ID NO: 18706 - protein, 55 aa, Artificial Sequence
  Synthetic
KELDDLRKRAEDVLRDLRRTNRKILEDVRRVIEELERSNERSLTEVERLLREVRK

SEQ ID NO: 18707 - protein, 59 aa, Artificial Sequence
  Synthetic
SEKERVLTELEKILEELRRRVEEILKEIEKLIEELRRHNERALERDKKLLEELKEVRER

SEQ ID NO: 18708 - protein, 55 aa, Artificial Sequence
  Synthetic
RELEKVKEKLDRLMKDIKEKLDRVKEKVRRVLKELEESNRKSEKDAKELIDRIRK

SEQ ID NO: 18709 - protein, 57 aa, Artificial Sequence
  Synthetic
SEVEDLLRDIERLIEESRRLVERLLERLEELIRRHTRLVEELIRELERMLKKVADEV

SEQ ID NO: 18710 - protein, 59 aa, Artificial Sequence
  Synthetic
DEIRTEIKKVVDKAREVNKRIKELIDKIKREAEENSKRANELIERITREIRRLLEDLRR

SEQ ID NO: 18711 - protein, 60 aa, Artificial Sequence
  Synthetic
SELEELRKRVKDLIRETKKLVEEVAEKVERLNKETKKLLEDVARIVEELIRRAEEVAERI

SEQ ID NO: 18712 - protein, 59 aa, Artificial Sequence
  Synthetic
EEVLRDIERLAREIEKVNREAEERIRRLKKKSEETNERVKRAIDKLAEELRRVLEEIRR

SEQ ID NO: 18713 - protein, 60 aa, Artificial Sequence
  Synthetic
SELEELAKAVEKLLEDLRRMTREVEEKVKEINERTKKLLKDVAERVKTLLREIEELAKKI

SEQ ID NO: 18714 - protein, 59 aa, Artificial Sequence
  Synthetic
REVLKAIKELMERIKKTLDEIRKRIKELEDESEKTNRELKKKIEDLKRELEELLREIKR

SEQ ID NO: 18715 - protein, 61 aa, Artificial Sequence
  Synthetic
SEIDEVIKTLEKLLEDLRRELEELSRRNKKVLEDILRRVKRLSDENRRLLERIKRTVDKRG

SEQ ID NO: 18716 - protein, 59 aa, Artificial Sequence
  Synthetic
EKIEKKVKEVRERVKEVLERIERLVDENRRENKEVVDRIKKLLKENEEEVREVLKRIRD

SEQ ID NO: 18717 - protein, 61 aa, Artificial Sequence
  Synthetic
SEIDDLVKKNKELVKKIREDVERLSEENKEVLKDIERKVRKVSEENDRLLEEIKDTVRKRG

SEQ ID NO: 18718 - protein, 59 aa, Artificial Sequence
  Synthetic
RKVEKKVRENKKENEDVLRDIERLVKENKDRNREVLKRIEDLLRKNAERVKRVADEIRR

SEQ ID NO: 18719 - protein, 59 aa, Artificial Sequence
  Synthetic
KEVEDIVDDVRRVIEELKRKVEEVSKKNEKLVREIEERVERISRRNKKLIKELKEIVDR

SEQ ID NO: 18720 - protein, 56 aa, Artificial Sequence
  Synthetic
EELLRKIARDLEKVREEIKELVKENRKTNEEVVRRIEKLAKENDDENRKVLKEIED

SEQ ID NO: 18721 - protein, 60 aa, Artificial Sequence
  Synthetic
DEVERIVEDIRRLLDEVRREVEKVSRENKELVDRVREKVKEISKRNKKLAKDLTDLVREG

SEQ ID NO: 18722 - protein, 56 aa, Artificial Sequence
  Synthetic
KELLDRIKEEIERVIKEIRELVEENKRTNEEVLRRIRELARRNEEENKRVLEDIRR

SEQ ID NO: 18723 - protein, 60 aa, Artificial Sequence
  Synthetic
SVEELIKEVKDRLRKVLREIEELIRENEEENRKNVEDVKRTADKLRRDLEKVVDEIDKRV

SEQ ID NO: 18724 - protein, 59 aa, Artificial Sequence
  Synthetic
KEVIDKVVKRVEDLVREIKEEVDKISEENKELVKRDTRRVEEVRERIRKLVEELRREVT

SEQ ID NO: 18725 - protein, 61 aa, Artificial Sequence
  Synthetic
SEIDRVIEKSDKTNEEIKRDVDRAVRRSEETLKRIRETVEEIVKTVEKLIRDLRRRVEDKG

SEQ ID NO: 18726 - protein, 56 aa, Artificial Sequence
  Synthetic
KDKAKELRDRLERSLREIAKKIKKVLDDTDRVLRDIERTIEELKKRLREVLERVRK

SEQ ID NO: 18727 - protein, 61 aa, Artificial Sequence
  Synthetic
SEIDDVIKKLKDLIEELEREVKEMSDENKRLLEEIEERVKEAIKRSKDTLEEIADRVRKKG

SEQ ID NO: 18728 - protein, 56 aa, Artificial Sequence
  Synthetic
KDKATKIEKDLRDVLRKIEKTMEDNRRENEELLKKVEEEVRRLEEETEKVLRDLRR

SEQ ID NO: 18729 - protein, 60 aa, Artificial Sequence
  Synthetic
SEVDEILKRIEELIRRIEDEVEKMIRESEDTIRRDEKEVKDAVRELADLIRRIEKRVRER

SEQ ID NO: 18730 - protein, 56 aa, Artificial Sequence
  Synthetic
EKKVREIDKRLKDALREIRKLIERSKEESRRALKRSRELMKRLEEELRRVLKEIRD

SEQ ID NO: 18731 - protein, 61 aa, Artificial Sequence
  Synthetic
DEVDKVLKRIKELIDEDKKEVEKVIRDSKRTLREDEERVRRAAKEVEDRIRDIEDIVRRRK

SEQ ID NO: 18732 - protein, 56 aa, Artificial Sequence
  Synthetic
KKKLEDIDRELDRVLEESKKEIEKSKRESEEVLKKSRDLVKRLAEELKRVLDEIRR

SEQ ID NO: 18733 - protein, 60 aa, Artificial Sequence
  Synthetic
SRVEEVLKEIDKLIKEIKERVKRLIEESKRLNREDEERVRKVIEESKKTLEEIREVMERN

SEQ ID NO: 18734 - protein, 56 aa, Artificial Sequence
  Synthetic
KDLLREIERRLREMLKEIEERIRRSKREVEESAERSERLIRKSEEDSERVLRELRR

SEQ ID NO: 18735 - protein, 60 aa, Artificial Sequence
  Synthetic
DEVERILERIEELLRKIRKDVEEAIKDSERLNKDDLKRVRDAVETLRELIRRIEEEVRRR

SEQ ID NO: 18736 - protein, 56 aa, Artificial Sequence
  Synthetic
KDLARDIDEKVRRLLEDIRRLVEESEKKVDESTEESRRLVTELERELREVLKRIRD

SEQ ID NO: 18737 - protein, 57 aa, Artificial Sequence
  Synthetic
SRVDELVKEAEDLLEEAKKANAESIRRIEELLKRVAEEIRRLSEEDKKLVEEVRKRV

SEQ ID NO: 18738 - protein, 59 aa, Artificial Sequence
  Synthetic
KRAEDKLRRVEEDARRVLEDLKRTLKRLEEEVRRVLEEARDILRKNAEENRKVLEDLRR

SEQ ID NO: 18739 - protein, 57 aa, Artificial Sequence
  Synthetic
SRVEELVEELKRLLRTVEKENEDSIREIERLLREVKRRNEESSREDEKTIRTVRREV

SEQ ID NO: 18740 - protein, 59 aa, Artificial Sequence
  Synthetic
KRAEEILERLRKEAEEVLKKLEDTLRELRKRAEKVLRDMEETLKKNKKDNEKVLRDLRK

SEQ ID NO: 18741 - protein, 57 aa, Artificial Sequence
  Synthetic
SEVDKIIKEIEDLLDEARKTNEKSSRDDKRLVEEVKELNKESSERNKRLVKEAREKI

SEQ ID NO: 18742 - protein, 59 aa, Artificial Sequence
  Synthetic
KRAEDKIRRIAKDAEDVLRTMEKTLRDNERENREVLKELEKTLRENEKENEKVLRDLKR

SEQ ID NO: 18743 - protein, 56 aa, Artificial Sequence
  Synthetic
EEIERVEEKVRRLIKELEDELRKIEERIERLLRRSRERNKEISDRNRRLLEEMRRS

SEQ ID NO: 18744 - protein, 56 aa, Artificial Sequence
  Synthetic
EEKARELEEELRRAVERVDRKIEELEERLDRVLKESRDTVDENEKRNEKVLRELET

SEQ ID NO: 18745 - protein, 56 aa, Artificial Sequence
  Synthetic
KEIEDVVETVRRLLRTSEELNERISRDNEKLLRDSEKLNREISERNRKLLKDLKDS

SEQ ID NO: 18746 - protein, 56 aa, Artificial Sequence
  Synthetic
EEAARDLARKLKEVHDRSRETIKRNEDKNRRVLEESKKTARENEERNKRVLDELRK

SEQ ID NO: 18747 - protein, 60 aa, Artificial Sequence
  Synthetic
SEEDRVLEDVERLLRELKKETDRIAEKNKKLNEDVTRETEEIVRRVRELLERLLDLVRKV

SEQ ID NO: 18748 - protein, 56 aa, Artificial Sequence
  Synthetic
SEKAREVEREVRRIREEDERILRELEERNRENKKRDEDILKELEDRAERVLEEIKR

SEQ ID NO: 18749 - protein, 60 aa, Artificial Sequence
  Synthetic
SEEDRVLKEAKDLLEEIERELDEVAERNKELNKRLTDETRKIERRVRELLRELKDKVRKV

SEQ ID NO: 18750 - protein, 56 aa, Artificial Sequence
  Synthetic
SRKLEKLEKEVREVEKRIRDILKKLEDDNRANRKRDEDIIDELRKEADRVREEIKR

SEQ ID NO: 18751 - protein, 59 aa, Artificial Sequence
  Synthetic
SEVEELVRRVEKSNRDIEEMVKKIDKRNRDLLRKIEKDLREADRRNEELLREIDDLVRR

SEQ ID NO: 18752 - protein, 56 aa, Artificial Sequence
  Synthetic
EKLLKEVEDRNRESAKEVKRLADENRKANEELKRRVEKLVRDNRRKNEELKKKVKD

SEQ ID NO: 18753 - protein, 59 aa, Artificial Sequence
  Synthetic
REVEELLKEIRKRIEDVRRRVEEIDRRNRKLLKEVEERLEKVRREVEKSNTDIKELAER

SEQ ID NO: 18754 - protein, 56 aa, Artificial Sequence
  Synthetic
EDLLRRVREEIERVIREVKRLLEENKKRNDEVRKRVEDIVRRLEEHHRELKRRVEK

SEQ ID NO: 18755 - protein, 56 aa, Artificial Sequence
  Synthetic
KDIEDILKESEKTNREILKRAEDASEENERINKRITDRVDRVRKEIERLLEELTRR

SEQ ID NO: 18756 - protein, 56 aa, Artificial Sequence
  Synthetic
KKLVDELRRRVEETLKRLRKLIADNREKNKDNLRRIEEEVKKLEEEIKKIKDEMKR

SEQ ID NO: 18757 - protein, 56 aa, Artificial Sequence
  Synthetic
KELEDIARESEKTNRDIKRRVDEVRKTIEDLLRRIDEEVKRAAEESKDTNRRIREE

SEQ ID NO: 18758 - protein, 56 aa, Artificial Sequence
  Synthetic
EDLMRKLKREVEETDKEIKDIIRRLKEEIEKIKRKIEEIIKKLKKENEDTRREADK

SEQ ID NO: 18759 - protein, 56 aa, Artificial Sequence
  Synthetic
SDIDDILRESRKINKEINDTVTEMMKRSKKTNDEIREKVKEVREESEKTNEEIRRE

SEQ ID NO: 18760 - protein, 56 aa, Artificial Sequence
  Synthetic
EKLVKELEDELRKSEERARRIIERLKEELKKTRKEIEDIIRELRKKLEDTLRDVEK

SEQ ID NO: 18761 - protein, 56 aa, Artificial Sequence
  Synthetic
SDIEKILRESKDINRRINERVDRVVERSKKTNEDILKKVKDAAEESKKTNDDIRKS

SEQ ID NO: 18762 - protein, 56 aa, Artificial Sequence
  Synthetic
EELVRELRRLVEESLKRIEKIIKDLEELIKETKRRLEEIIERLEKKNEDTEREARK

SEQ ID NO: 18763 - protein, 56 aa, Artificial Sequence
  Synthetic
DEIREIVKESKRINEEINRKVEEVVRRSEKTNEDIRDTVRRLVRESDETNRRIEES

SEQ ID NO: 18764 - protein, 56 aa, Artificial Sequence
  Synthetic
EDLVRELRKEVKRSEDRIRKIIRDLDELNRRSKEDIKRKIDELRKRVEETKRRVTK

SEQ ID NO: 18765 - protein, 56 aa, Artificial Sequence
  Synthetic
DDIEEILKDVKRLLDEILAKVKKASDDNKRILDEIERKVEEMVRRSEKTNEDIRRS

SEQ ID NO: 18766 - protein, 56 aa, Artificial Sequence
  Synthetic
EELVRELKKRVDEIKERARRLIEENRERNKEIKERAERIIERLRKINEDTKREAEK

SEQ ID NO: 18767 - protein, 56 aa, Artificial Sequence
  Synthetic
DEIEDIVRRVKKLIRDLEERVKKLEEDSDRTNERIRREAEKASKRNKEILDKLRKS

SEQ ID NO: 18768 - protein, 56 aa, Artificial Sequence
  Synthetic
EELVKELRKELEEVKEEIRKIIEELKRRNDKSRRDLERLIRDNEDKNRRLKKEAED

SEQ ID NO: 18769 - protein, 56 aa, Artificial Sequence
  Synthetic
EEIERIIRESEKINKEINRTVKEVEKRSEETNRRIREELKRISKRNKEILDRLRKE

SEQ ID NO: 18770 - protein, 56 aa, Artificial Sequence
  Synthetic
EKEVEKLKRKVEKSEEDIRRIIEKLREENKRSEEEVRRLITENEKRNRKLLEEAKK

SEQ ID NO: 18771 - protein, 56 aa, Artificial Sequence
  Synthetic
SELEKIAEDSERINKEINERVKRISDENKRILEEIEKAVEEASRDNKRILDELRKS

SEQ ID NO: 18772 - protein, 56 aa, Artificial Sequence
  Synthetic
EELVRELERRVDESRKRAEDLIRDNKKKNDEARRRVEELIRRNREENRRIAEEARK

SEQ ID NO: 18773 - protein, 60 aa, Artificial Sequence
  Synthetic
SDAERIMRESEELNERINDVVRRVAEESKRLNDRINDVLREVSKRNKDLIKRIKEVVDRN

SEQ ID NO: 18774 - protein, 56 aa, Artificial Sequence
  Synthetic
ERIIERLDRLTKKSLEELKRIIEDLKRRTKESEDRARELIKRNREENKRLLEEAEK

SEQ ID NO: 18775 - protein, 60 aa, Artificial Sequence
  Synthetic
DEAERIREESEELNERINREVDKMIDEDRKLNEDIRRTVEEMVREIKELLDRIRKVLEEN

SEQ ID NO: 18776 - protein, 56 aa, Artificial Sequence
  Synthetic
KEIIKELRETTERSRKRLEELIRDSEEKNRRTEDELEKIIRELDERLRRLEEEARK

SEQ ID NO: 18777 - protein, 60 aa, Artificial Sequence
  Synthetic
DEAEDIARKSRELNERILRRVKEMIDEDRDLNREIEKTLRRVSERNRELVEEIKREVERN

SEQ ID NO: 18778 - protein, 56 aa, Artificial Sequence
  Synthetic
ERIIEELRRLTEDTKRRADKLIKDSEDENRKTLRRARELIEENRDRNRKLEEDVRR

SEQ ID NO: 18779 - protein, 60 aa, Artificial Sequence
  Synthetic
DEVREIVKRSDDLNDTIREVLKRVADDSRRLNEEIRRKVTEASRENEELIKEIEDRARKN

SEQ ID NO: 18780 - protein, 56 aa, Artificial Sequence
  Synthetic
EEIIKRLRDRTKKTLDEVRKIIEDLKDESRKTSEELRELIKRNKEKNDELLERLER

SEQ ID NO: 18781 - protein, 60 aa, Artificial Sequence
  Synthetic
SEAEKIERESRDLNRRIREVVERASEDNERLIREIRKRLEEVVRTIEKLIRDILERVRKN

SEQ ID NO: 18782 - protein, 56 aa, Artificial Sequence
  Synthetic
EEIIKELKKITDKTRRELERLIDENRKRNEELLKRVEDIIRELKRRLEKLDEEVKR

SEQ ID NO: 18783 - protein, 60 aa, Artificial Sequence
  Synthetic
SEVERIEKESRDLNREIKEEAKRASEDNRRLLEDIRRKLEKVSEENKDLLRKIEEEMRRN

SEQ ID NO: 18784 - protein, 56 aa, Artificial Sequence
  Synthetic
EEIIKKLKRLTDETEKELEKLIRKNEKENRDLEREIRRLIKENRDRNRELKKRAED

SEQ ID NO: 18785 - protein, 60 aa, Artificial Sequence
  Synthetic
SEVEKAVREIEELIKRIEDRLREMARRVEETNKTLLRDVERLSKENEELVREIKERVREN

SEQ ID NO: 18786 - protein, 56 aa, Artificial Sequence
  Synthetic
EELVRELERKIKTVLDRVEEIIRRLDKKTKDTVRRVRELIEDNKRKNKKILDEVRK

SEQ ID NO: 18787 - protein, 60 aa, Artificial Sequence
  Synthetic
SEVERIVKESEELNEKITRDLEEAEKEVRKTNDEIRRVVEEMSRRNEKLIRDIDDEVRKR

SEQ ID NO: 18788 - protein, 56 aa, Artificial Sequence
  Synthetic
DEIIKELEKKTRDNLDKVRKIIERLRRETDKTEKELRDIIRKNEDENRKLEEKVRR

SEQ ID NO: 18789 - protein, 60 aa, Artificial Sequence
  Synthetic
SKVEKLAKEVEETNRRILDEVRRASEENKDLVRRIEETVKRAVEEIKRLIEKIDDVVTKN

SEQ ID NO: 18790 - protein, 56 aa, Artificial Sequence
  Synthetic
EEIIKELRKRSEDSEREARKLIRRNEEENEKLRKKLKEIIDRLREELEKVLDRVRK

SEQ ID NO: 18791 - protein, 61 aa, Artificial Sequence
  Synthetic
SEVERAAEESKRLNKTIRDENREVLREIRDLIRRMKEENRRMVKRVDEVLKEIRELFRRDK

SEQ ID NO: 18792 - protein, 59 aa, Artificial Sequence
  Synthetic
EKVREILERLERESRKTAKELDESNREAEELLKRVADEAKKSNETLRERLERLAREAEK

SEQ ID NO: 18793 - protein, 61 aa, Artificial Sequence
  Synthetic
SELEELIRKIEELIRRIEEENKEMVRRSRKLNEDLERRLDEVRRRVEKLIREIEELLKRDK

SEQ ID NO: 18794 - protein, 59 aa, Artificial Sequence
  Synthetic
ERAKRLLDELKRLIKELEDKLRESNEELKRRSDDSARKAEKILRELKKKVDEMADRARK

SEQ ID NO: 18795 - protein, 60 aa, Artificial Sequence
  Synthetic
DEAEKLAEDVRRVIKRIREDNKRLSDRNKELLEEVEKDNKKSEEDVKRVIEDIERRVREL

SEQ ID NO: 18796 - protein, 56 aa, Artificial Sequence
  Synthetic
RELLDELRRRIEELRKRLEDSNRENEEELRKIADKVRKTNKRLNEEVEDMFRRAKT

SEQ ID NO: 18797 - protein, 57 aa, Artificial Sequence
  Synthetic
DEARELLRDDERLNRELNDLDRDSSKKDEDLNRKLNEDDKESVERADTLLERIKREV

SEQ ID NO: 18798 - protein, 56 aa, Artificial Sequence
  Synthetic
RELIRELEERNRDSVRKSRKSNEDNERTNRESIERSRRSNEELRRRAEELIKDLRR

SEQ ID NO: 18799 - protein, 57 aa, Artificial Sequence
  Synthetic
SEVEELLERDKDLNRRVNELNEKTSREDEKLNDEINKRIDRLVERARELLERIRREV

SEQ ID NO: 18800 - protein, 56 aa, Artificial Sequence
  Synthetic
ERLIRELEERNRESVERVRRSLKENEDRNRESKKRLEDLLREVKRLMDKLEEDLRK

SEQ ID NO: 18801 - protein, 57 aa, Artificial Sequence
  Synthetic
SEVEELLERDKRLNDEANRLNRELVERDKRLNEELNKELKRMADEIKRLLEEIRRKV

SEQ ID NO: 18802 - protein, 56 aa, Artificial Sequence
  Synthetic
ERLIEKLERENRESEKRARDSNKELEKRNRESEDRARRILKKLEDDVRRLKKELET

SEQ ID NO: 18803 - protein, 60 aa, Artificial Sequence
  Synthetic
SELEKVRTDVERVIRELEKELKEIDEENKKVNKDVEEEVKRIEEENKEMNDRLDDLRRRG

SEQ ID NO: 18804 - protein, 56 aa, Artificial Sequence
  Synthetic
SKEMEEVREELERLLRRIKKILEELRDENRKSLERLEDVLRRLEKRNRDTLEEVKR

SEQ ID NO: 18805 - protein, 60 aa, Artificial Sequence
  Synthetic
KETEDVERDVERVIREIDTKLKEIEKKNDKANKELEEKLKKIEEDNKRVNERLKRLREEG

SEQ ID NO: 18806 - protein, 56 aa, Artificial Sequence
  Synthetic
SEEMRRVREEAKRLLDKVKKILRDLERRNEEVLKKIKDIMRRLEKRNRDTLEEIRT

SEQ ID NO: 18807 - protein, 60 aa, Artificial Sequence
  Synthetic
SEEEKVLEEVKRAIDELKKELEEVEERNKRVNDDIRRLTDEIRKENKTANDRLRKLLEEG

SEQ ID NO: 18808 - protein, 56 aa, Artificial Sequence
  Synthetic
SKKLEEVRKEVKRLKDEVEKILKDLRKRNKDLLEEDKRVLDRLRETNEKTLDDVRR

SEQ ID NO: 18809 - protein, 61 aa, Artificial Sequence
  Synthetic
KEEEDITRRIDKILRDLREKLRDVNRRVEELSKRLHDKLEKVLKRIKDEAERLRKEIREKL

SEQ ID NO: 18810 - protein, 55 aa, Artificial Sequence
  Synthetic
KELEDKVEKDARDVERHIRKDLTDVRRRHEDLDRKIKELLDRVRKAIRDVEEKIK

SEQ ID NO: 18811 - protein, 61 aa, Artificial Sequence
  Synthetic
SKAEELLRRVEELLKRVKDKVDDIVRKIEKSNRDLERRDEEVLREVEETNRRLEEELRRRG

SEQ ID NO: 18812 - protein, 55 aa, Artificial Sequence
  Synthetic
EEVLRRLEELIRRAERKLEKMLEDLTRLNKEWEDRTRKLLEDLRRINEEIKRKIK

SEQ ID NO: 18813 - protein, 61 aa, Artificial Sequence
  Synthetic
SEKDELLRDVRRLLKEVEKELEEIRRRVTESNRELEKLVREVLEESKRSDDKLREDLERAG

SEQ ID NO: 18814 - protein, 55 aa, Artificial Sequence
  Synthetic
KDLLERLKELIKRLKDKLKEIADRLRRINEDIERKIREILEDSRRFNEEIKKKID

SEQ ID NO: 18815 - protein, 58 aa, Artificial Sequence
  Synthetic
STLETLEDEVRKIVTDIERVIRESNKHLKKSIDDVERVIEEIERRAREIVKKVRDVIS

SEQ ID NO: 18816 - protein, 58 aa, Artificial Sequence
  Synthetic
EKLERILREIKRIVEDLKKKVEDSLKRYEEELERLKEDLRRLLKRIRDEVEELKKESD

SEQ ID NO: 18817 - protein, 59 aa, Artificial Sequence
  Synthetic
DEEEKLRDEVEKIVKKIEKAIEDLRRHAEKSVTDIRKVLKELEDHIRESVKDAERFISE

SEQ ID NO: 18818 - protein, 58 aa, Artificial Sequence
  Synthetic
EKLEKILREIERIVEKLKEDLDRLLKRYEDELRRLKEELERILDTYRRLLEELERRLR

SEQ ID NO: 18819 - protein, 58 aa, Artificial Sequence
  Synthetic
DTARELEREVKKIVDEIEDVIRRLRRHIEESVKRAEKVLREIEKHARESAKRIADVVS

SEQ ID NO: 18820 - protein, 58 aa, Artificial Sequence
  Synthetic
EELKEILERIEEIVKRLEEELRRLLEEYKKRIEELAKRIKEVLDEYRKILKRLEDETK

SEQ ID NO: 18821 - protein, 60 aa, Artificial Sequence
  Synthetic
DEAEELRKDVKRVLDEIKKRHEELLRKVREDLDRIRRKLEELAKRHRELLKEVKKIVDRD

SEQ ID NO: 18822 - protein, 56 aa, Artificial Sequence
  Synthetic
DKIRREIDELIKKLEEESRRIEEEIKKLVEDLKREADKIMEELERETDKLKKELDK

SEQ ID NO: 18823 - protein, 57 aa, Artificial Sequence
  Synthetic
SEKEKILEEIREVLKRILDRLKKELEDDKKSLDDNKRRTEEALREDKKSLEEIRRAN

SEQ ID NO: 18824 - protein, 56 aa, Artificial Sequence
  Synthetic
DKILRDLEKALDKLRRDIEEILKRSRDLNKKLEDDNREALRRSEELNRELEERERK

SEQ ID NO: 18825 - protein, 57 aa, Artificial Sequence
  Synthetic
SEEERIRREIKKILDDIKEEAERRLEEDKKSLDENRKKTEEVLKKIRDDLKRIEEAK

SEQ ID NO: 18826 - protein, 56 aa, Artificial Sequence
  Synthetic
DEILRRIEKLIEDLKRTIDKILEDSERLNRKLEKENREALKELRDLLRELEERLKK

SEQ ID NO: 18827 - protein, 56 aa, Artificial Sequence
  Synthetic
EELERILRKITEMLREIARKLKKLLEDDKESLDRNKEKTEDDLRRDKESLDRLRKS

SEQ ID NO: 18828 - protein, 56 aa, Artificial Sequence
  Synthetic
DKILRDLEELLKDLERKIRRILDESRKLNDELRKENKKAEDTSRRLNEELEERLRT

SEQ ID NO: 18829 - protein, 56 aa, Artificial Sequence
  Synthetic
SELEEILKRVEDVLRDILRKLKEVLDRAEKVIRDNKRKTKKMLDDDKRSLDEIRKA

SEQ ID NO: 18830 - protein, 56 aa, Artificial Sequence
  Synthetic
DKILRELEKRLEDLRKRIKDILDDLKRKLEELKRENEKFLRRSKKLNEDLERELET

SEQ ID NO: 18831 - protein, 56 aa, Artificial Sequence
  Synthetic
DELEEIRDRIKRKLEKLKEETKRTLEEDRKSLDDNRRKTEEALRRDRESLERIERA

SEQ ID NO: 18832 - protein, 56 aa, Artificial Sequence
  Synthetic
RDILEELTRLLDKLRRDHERVSEESKRRNDELEEENRRVLKESEDRNRELEERLRQ

SEQ ID NO: 18833 - protein, 55 aa, Artificial Sequence
  Synthetic
SELEKLLDDVKKDLKRIEEHLRRDEEDSKRRIEELERHLERDKKEVEKAIRELDK

SEQ ID NO: 18834 - protein, 56 aa, Artificial Sequence
  Synthetic
EKVVRTIEKLLTDLERKIREIEKRSKELLTRLEEKIKKAERESRKLLRELTERIDR

SEQ ID NO: 18835 - protein, 61 aa, Artificial Sequence
  Synthetic
DELKKLLDDVREVSKRLNDELRKIMEEIRKVSEDLNKELDDIVRKIKKVIDDISEKIKRDG

SEQ ID NO: 18836 - protein, 55 aa, Artificial Sequence
  Synthetic
EEIEKEIRELLKENRRRADEIRRRAEKSLKDNERRVEKVEREAERLLREIEKELK

SEQ ID NO: 18837 - protein, 61 aa, Artificial Sequence
  Synthetic
SELEKLAEDVKRKLTEIREKIKKLLKETRDVSRELNKELEDLLRRTTEVIDEIRKKIEKEG

SEQ ID NO: 18838 - protein, 55 aa, Artificial Sequence
  Synthetic
EDIKKEIEDLLRDLERLLRDVNREVEELLKENRKRLEEINRTVERLLEEIEKRLR

SEQ ID NO: 18839 - protein, 61 aa, Artificial Sequence
  Synthetic
SELEELVRRLREVSKRLNEELDRILDRTRRLAERISEDIKRLADETKEVIERIKEEIKKKG

SEQ ID NO: 18840 - protein, 55 aa, Artificial Sequence
  Synthetic
EEIEKEARELLRDNRRRIEEINREVEELIRRLEKLLKEVNETVKRLLEEIRKDLD

SEQ ID NO: 18841 - protein, 61 aa, Artificial Sequence
  Synthetic
SELEKLMKDVKEVIDEIRKKLRKILEDTTRVAKRNEEKLKRIADEAEKVIREIRDEIEKKG

SEQ ID NO: 18842 - protein, 55 aa, Artificial Sequence
  Synthetic
EEIKKRIDDLLRRIEKEIEEINRRVEELHKRLEDLHKEIEDKVRELLTRIEERLK

SEQ ID NO: 18843 - protein, 56 aa, Artificial Sequence
  Synthetic
SEVEEILERIERLIRDDNRKLKDVERRNRENIKEDNERLKRMMEELKKIADEIRKA

SEQ ID NO: 18844 - protein, 55 aa, Artificial Sequence
  Synthetic
DSIRRTVEKLLEDNRRRNEEILKESEDLLRKNREKTKEIVERAERLLDKLRRERK

SEQ ID NO: 18845 - protein, 57 aa, Artificial Sequence
  Synthetic
DEAEELKERIERLSRRIDEEYRRLLEDYERLLRELEKKIEDLKRELEKLVEELRREG

SEQ ID NO: 18846 - protein, 55 aa, Artificial Sequence
  Synthetic
EELKEKVKEIVKRSEEDIRRLKKHLDESIRTAEEVIRRLREKIKRIIDTVRDAKR

SEQ ID NO: 18847 - protein, 57 aa, Artificial Sequence
  Synthetic
SELEELEKRIRRLSEEIKKLLDDLRREYEELVKELRRRLEELRKEIERLSEELKAEG

SEQ ID NO: 18848 - protein, 55 aa, Artificial Sequence
  Synthetic
DEMREKVDEIVKRSRDVIKELREHIEESIRRAEKVLRDLEREVRKIIEDARERTR

SEQ ID NO: 18849 - protein, 56 aa, Artificial Sequence
  Synthetic
REVDELRKEIERLSRKIEDDLKKLEDRYEELLEKLERDLEKLKEDYDRLLRKLEED

SEQ ID NO: 18850 - protein, 55 aa, Artificial Sequence
  Synthetic
EKAEEDVRRTVTESKKVIDELREHIKKSIREVEEAIKRLREHVERSIRRAEEATK

SEQ ID NO: 18851 - protein, 60 aa, Artificial Sequence
  Synthetic
SEEEKLDEDLERLREEIRELHRELEELIKKLREEVRRIIEKVRTHLKRDRDRAKEVIEKV

SEQ ID NO: 18852 - protein, 55 aa, Artificial Sequence
  Synthetic
ERMREKLEKIKKDVDKLSKELHDKLDKVLKEIEELLRDVKRAIKKVNDDIKERLR

SEQ ID NO: 18853 - protein, 61 aa, Artificial Sequence
  Synthetic
DEIRELVRRFEELVRRNVEHLKKLLRDAEKLVKENEKHLEDLLREIEETVKRLLDKIRREG

SEQ ID NO: 18854 - protein, 59 aa, Artificial Sequence
  Synthetic
KDKARDVEKRIEDLNREIKEIIRRVEERLKELNKRIEKLLEEVRDTLRRLKEELDRAMT

SEQ ID NO: 18855 - protein, 61 aa, Artificial Sequence
  Synthetic
SEIEELLKEVERRVRENKKHLKRLLEDIKRLVERNAEDLERILRDAERIVRELIKKIRRDG

SEQ ID NO: 18856 - protein, 59 aa, Artificial Sequence
  Synthetic
KDKLRRIEKALEDLNREIEEILRRVKEEIERLNREIEELLKRVEEELKRLEKELEEELK

SEQ ID NO: 18857 - protein, 61 aa, Artificial Sequence
  Synthetic
SEIEELLKEVRKRVKENAEDLKRLLDEAKKLADDNVKHIEDLIREVEDIIRRLKERIKRTG

SEQ ID NO: 18858 - protein, 59 aa, Artificial Sequence
  Synthetic
KDKARRLREELRKLNEDIERLLKRVEDELRKLNKKIKDILEEVEEVLERLLRELREEER

SEQ ID NO: 18859 - protein, 63 aa, Artificial Sequence
  Synthetic
REKEELKKELKKLIEELKRSHDELKEELKRLLKRIEDILRENRKTTEDLSRELKKLLEELRKK

SEQ ID NO: 18860 - protein, 59 aa, Artificial Sequence
  Synthetic
REELKRLLEELRRMIKELKDRNRKALEELEKVIREIEEEIKDINRRLREEIRRLEEEAR

SEQ ID NO: 18861 - protein, 63 aa, Artificial Sequence
  Synthetic
SKEEELRETLKRLVDEIRRMLEEDRRSDEELVRRIERVLEEDKREDDRLHKRLRDELRRLRKD

SEQ ID NO: 18862 - protein, 59 aa, Artificial Sequence
  Synthetic
EDELRRLLRELEEMAKKLEKELRDNNRDLRRVAEELKELIDDNTRKLKEVIEKLEREIK

SEQ ID NO: 18863 - protein, 63 aa, Artificial Sequence
  Synthetic
SEKETVRDELRKLVETIRKLLEEDKESDKRLADRIRELNEENKEDTERLIRELEKVLEELRKK

SEQ ID NO: 18864 - protein, 59 aa, Artificial Sequence
  Synthetic
EERLRKLLERLERVIRDLLRKIEENNKRLRKAIKELLDELRKINKELREVIKKLLDDAR

SEQ ID NO: 18865 - protein, 63 aa, Artificial Sequence
  Synthetic
SEKERLKEELEKLSKEIEDILRDDKRSDDELRRRLRELLEKDRREDERLNEELKRMLEEARKR

SEQ ID NO: 18866 - protein, 59 aa, Artificial Sequence
  Synthetic
EELLRRLLEKLKRMAEKLKRDIEDNNRKLRKVATELAKEIEDNSEKLREDAKRLSEKIK

SEQ ID NO: 18867 - protein, 63 aa, Artificial Sequence
  Synthetic
DEEEELRKRLEKLSKEVRELLRRDEEEDRRLNRELEELLKDHERTVRDLSREVEDLLRKARRK

SEQ ID NO: 18868 - protein, 59 aa, Artificial Sequence
  Synthetic
EDELRELLRRLEDVIRKLAEDLKRNTEDLRRVIKELAERLEELNKRLKREIRRLKEELR

SEQ ID NO: 18869 - protein, 60 aa, Artificial Sequence
  Synthetic
EKSERLRERLRDLLRKHKELLDRNEKTLEEAERRVEKLLEDNERELKKIEDEVRELLKRL

SEQ ID NO: 18870 - protein, 55 aa, Artificial Sequence
  Synthetic
KEILREIEERFKRLAEDLKRSNDKVRELVDKAEKDIRKSNEELRKLARDVRERVR

SEQ ID NO: 18871 - protein, 60 aa, Artificial Sequence
  Synthetic
SDEDRLRELLRKLREDHERIVRELRKRLEEVLREIERLLKKNEEDLERIRREVEELLKRI

SEQ ID NO: 18872 - protein, 55 aa, Artificial Sequence
  Synthetic
EDIEREIRDTLRRLREDLERIKEDVERLRREIKKRIEDSNRKVRDLLRRVKEAVR

SEQ ID NO: 18873 - protein, 60 aa, Artificial Sequence
  Synthetic
DEERKLEKSLKDVEDTHRRLLEKNDEDLKELRKRVEDMLRRLEDALRRILEDIEEKLKRI

SEQ ID NO: 18874 - protein, 55 aa, Artificial Sequence
  Synthetic
EKILREVEDLLRKVAEDLKRSNDEVKELAERLEETIRDLLRRIEEILKEIEERVR

SEQ ID NO: 18875 - protein, 60 aa, Artificial Sequence
  Synthetic
KDEERLKRFLEDIRRRHRELLERNERALDEIRRRHEELLRRNEEAIKDIERRVRELLKRL

SEQ ID NO: 18876 - protein, 55 aa, Artificial Sequence
  Synthetic
EEILKEIEELLRRLEENLRRNHKEVRELLEKVRRNIEENHREVRRLLEEVERRAR

SEQ ID NO: 18877 - protein, 60 aa, Artificial Sequence
  Synthetic
DEEETLEDVLRELEERVEKLLRDLTRDLERVEKEHKELLKRNKEAIDEIEKRIEELLKRI

SEQ ID NO: 18878 - protein, 55 aa, Artificial Sequence
  Synthetic
DEILRKIEELLRRAEEVIRDLERKVRKLERDIRENIKKNHREVREILRKIEEDVR

SEQ ID NO: 18879 - protein, 57 aa, Artificial Sequence
  Synthetic
KDEERLRELIKRINTEVKKSLDENKERLDKVEEDIRRSLKENEDRMERVRREVEKAN

SEQ ID NO: 18880 - protein, 56 aa, Artificial Sequence
  Synthetic
IEEIKKRLEDILEETRDMSRRLNEELRRILERVKEVSKELNRELEEILKRVEDARR

SEQ ID NO: 18881 - protein, 57 aa, Artificial Sequence
  Synthetic
SEKEDLERELEEVRRRVEESLRKNEEDVKRVRDELKKLLDENRKELERIRREVERAN

SEQ ID NO: 18882 - protein, 56 aa, Artificial Sequence
  Synthetic
MEEIKKEIEKILRDIERVSRELNKKLEEIVRRLKKVSDELNRRIEEIAERVRRRRK

SEQ ID NO: 18883 - protein, 56 aa, Artificial Sequence
  Synthetic
KDEERLDEELKRVNDEVRRLLARNEETLERIEREVKRLLDENEKRAEDIRKEVEDS

SEQ ID NO: 18884 - protein, 56 aa, Artificial Sequence
  Synthetic
IEEIEKTIREELKETRKVSEELNRELERILRELRKVSEELNKDLEKILRRVKKERK

SEQ ID NO: 18885 - protein, 56 aa, Artificial Sequence
  Synthetic
SEEERLREILKDINRRVEELLKENEERMERIREELEELLERLKEELERIRKRVEEE

SEQ ID NO: 18886 - protein, 56 aa, Artificial Sequence
  Synthetic
VEEIEKDIRRLLRETERVSEELNKKLEEIARELREMIKEIKERLKRILEEVEKRRR

SEQ ID NO: 18887 - protein, 56 aa, Artificial Sequence
  Synthetic
SEEDELRRLLKEVNERVERLLDEIRKELEKIAEELRDLLKKNEDKLREIKRRVEEN

SEQ ID NO: 18888 - protein, 56 aa, Artificial Sequence
  Synthetic
TEDIAREIRELMERTRRVIEEIKKELRDILEKLRRVSEELNKKLDEILKRIEDRTR

SEQ ID NO: 18889 - protein, 60 aa, Artificial Sequence
  Synthetic
REIEKLIRDYRRILRELSEKIRRLAEEHEDIVRKLIETLKRLIDEIRKIMEDLSRLLRRD

SEQ ID NO: 18890 - protein, 59 aa, Artificial Sequence
  Synthetic
KKLMDELRRVSEEVNTRLEKLLRDLEKKLRDSEERAKELIRRIEKTLEDIDRRLKEEEK

SEQ ID NO: 18891 - protein, 61 aa, Artificial Sequence
  Synthetic
RELEKLMEDAERYAKRSMEAFEDLIRKHDELLKRLEKKLRDLIKRIEKLLREIKEKIERTG

SEQ ID NO: 18892 - protein, 59 aa, Artificial Sequence
  Synthetic
EELLKRAKELIETIEERSKRVVDENKRVVERSRRRLKKLLEDIERVLERIERRLTEAKK

SEQ ID NO: 18893 - protein, 61 aa, Artificial Sequence
  Synthetic
SELEKLLEDIERYVKRSKEKARELIKRHKEYVRRSEERLRRLIEKLEKLAEKLKELIRRTG

SEQ ID NO: 18894 - protein, 59 aa, Artificial Sequence
  Synthetic
DSLLKEVEDLLRKVEEESRRVIEENKRVVEESRKRSERLLREIEKELRRVEKEFRDEKR

SEQ ID NO: 18895 - protein, 61 aa, Artificial Sequence
  Synthetic
SELEDLMRDVKRYADESARRIEEIIKRHRKLVREISKKIEELIRELRKLIERILELIRRDG

SEQ ID NO: 18896 - protein, 59 aa, Artificial Sequence
  Synthetic
EELLDRARKLIREIEERSKELSKRNKEEVDRSEERIRRLLKRAEEELRRVREELKEASR

SEQ ID NO: 18897 - protein, 56 aa, Artificial Sequence
  Synthetic
SREEEIRELLKRSKESLEKLLRELDKEHKESEKSARELLKRNEKRLREIREEIRRL

SEQ ID NO: 18898 - protein, 59 aa, Artificial Sequence
  Synthetic
EEVMKRLLKEIRDVNKEITERLEEHRKRLEEINRDVERIIRELNEEHKEVLKRIREKAK

SEQ ID NO: 18899 - protein, 60 aa, Artificial Sequence
  Synthetic
SEREELRKLLRRIEEEAKRLLEELKRTTDDTRRENEELLRRLEELSKETKKRVEDLLREL

SEQ ID NO: 18900 - protein, 56 aa, Artificial Sequence
  Synthetic
VKDVLKKLEDVLRELKKAVEKIKRDNKRAVDENRELVERIMKENKDAMKKLEEDVR

SEQ ID NO: 18901 - protein, 60 aa, Artificial Sequence
  Synthetic
SEREELRDLLRRIKEDAERLLKEHRDLLEEVRKEVEKLLRELRKLSKETEDEAERLLREL

SEQ ID NO: 18902 - protein, 56 aa, Artificial Sequence
  Synthetic
IKDVLKKLKEVLKKLRDDVEKSKRDTKRVLDRLRDTVRKIMEENRRALKEIADEVK

SEQ ID NO: 18903 - protein, 60 aa, Artificial Sequence
  Synthetic
DDEERLREEVERVERTVRDLLRRLRELTKKTDEDNRKLLKEHEDLLREVVKRVTDLLKDL

SEQ ID NO: 18904 - protein, 56 aa, Artificial Sequence
  Synthetic
VKDVLKEIKEVLREVTERAKEIADDNRRALEENEREVKRSKEDTKRALRKLEEEVK

SEQ ID NO: 18905 - protein, 56 aa, Artificial Sequence
  Synthetic
SSSEELEKLLEEVRRELRRLAEEVKRLNEEIDKDIDRLAEENDRLHKEVKKDLDRL

SEQ ID NO: 18906 - protein, 59 aa, Artificial Sequence
  Synthetic
EEVVKRILDEIRRTLEEIKEIARRYLEKNKKEMREIRETMKRDNDHLEDLLRKIRETAR

SEQ ID NO: 18907 - protein, 56 aa, Artificial Sequence
  Synthetic
SDEERIRKKLREIEERHKKLSEELKELLRRSEESVRRLLEKNRKDLDEVRKRIEDL

SEQ ID NO: 18908 - protein, 55 aa, Artificial Sequence
  Synthetic
EEVERRLDRLLDESRRLAEELKERIKRVNKRARELVRESEEHLRELLEKVERDAT

SEQ ID NO: 18909 - protein, 56 aa, Artificial Sequence
  Synthetic
SDKDELKTRLDRVREIIERLARESEELHKELKKRLEDLKRDSERLHRKNLEDIRRS

SEQ ID NO: 18910 - protein, 58 aa, Artificial Sequence
  Synthetic
EVTDRIREDIKRVIEEVRRLAEEDKESVKEILKKIEKLADEDRRSVEKNHKEVEDTRR

SEQ ID NO: 18911 - protein, 58 aa, Artificial Sequence
  Synthetic
RDEERAEELLKEIKDTVDELKKEVEKVLDESRKRDKKLNDELRKLLEDSRRTIERDVR

SEQ ID NO: 18912 - protein, 55 aa, Artificial Sequence
  Synthetic
DKLLEELRKILEELRKKVKDLIEEHRRLVKTSADRVKRLLDEHRRILKELKDRRK

SEQ ID NO: 18913 - protein, 61 aa, Artificial Sequence
  Synthetic
DEAEELIKRIEDLLRELARRMEEILRRHEEYVKKSAEDVKRLLEEVEKLADDLRREVERDG

SEQ ID NO: 18914 - protein, 59 aa, Artificial Sequence
  Synthetic
EEVARKIEEVLRRVKEELTKLVEENERKLRESRERSKKLAKEVEDLLREIKRRVEELER

SEQ ID NO: 18915 - protein, 56 aa, Artificial Sequence
  Synthetic
SERETLEELLERVERLLEKLKRELDEAHKKNKEDLDRLRDKNRKRLEDIKRTIDRI

SEQ ID NO: 18916 - protein, 55 aa, Artificial Sequence
  Synthetic
EELLKELKEVLERIRKEVEKLLRTLEEINKTTRKLVEETNEKADRILEKVKRDAK

SEQ ID NO: 18917 - protein, 56 aa, Artificial Sequence
  Synthetic
SEDEKMEELIKRSEDKLRKLEEDVRRLLEEIRRRAEDNTRRNERTLREIERTLREI

SEQ ID NO: 18918 - protein, 55 aa, Artificial Sequence
  Synthetic
EELVRELEKIDRETTEVVKKLLEELKDIMRRVHERSEESLREAKKILREVEERAR

SEQ ID NO: 18919 - protein, 60 aa, Artificial Sequence
  Synthetic
SEEEELDKLLKEVREKDERLKREVEELLRRIKKRLEELKRENDELLKEVREVLKKLAKET

SEQ ID NO: 18920 - protein, 56 aa, Artificial Sequence
  Synthetic
VEDVLRRIEEVARRIERLYEELLKKLRDVVREIEKRVREHNEDVKRVVREIEKRIK

SEQ ID NO: 18921 - protein, 56 aa, Artificial Sequence
  Synthetic
DEVEKVKEEIKRLNEDVRRLVEEYRKRLEKLNRDHRDYVKKSEKRIRDLIREVRRR

SEQ ID NO: 18922 - protein, 59 aa, Artificial Sequence
  Synthetic
EDATREIDKALEDHRESVERLVRELERLNEENRKSVKKSEEDSRRLLEEVRRELRRKRK

SEQ ID NO: 18923 - protein, 58 aa, Artificial Sequence
  Synthetic
DEEERVEELLRRDRESDKELRERLRKLNEENRDETEKLIRELEDSLRRLKEELEKKGK

SEQ ID NO: 18924 - protein, 55 aa, Artificial Sequence
  Synthetic
KELEKELRDNNRRLEEVIRRLEEELKRISEELRKVIKKLKRDNEEKLRRLDEATR

SEQ ID NO: 18925 - protein, 60 aa, Artificial Sequence
  Synthetic
DEEERVKDINRRNEEDSRRLERRIRELNRENRKSSKELADRVRELLKRAEERLRTEGKDK

SEQ ID NO: 18926 - protein, 55 aa, Artificial Sequence
  Synthetic
EELVKKLEDINRRLREAIKRLEDTIREINKELRKKIKELLDRLKEIVKRLEDRAR

SEQ ID NO: 18927 - protein, 58 aa, Artificial Sequence
  Synthetic
SAEERIKRINKKNRDDSEKLKRRIEESNRENKRSSDELVKRLEELLRKLEEDLKRKGK

SEQ ID NO: 18928 - protein, 55 aa, Artificial Sequence
  Synthetic
KELEKKLRKINEDLKRAIRKLEEDNKRANEELKKRAEDLLREIEEIIRRLEERTR

SEQ ID NO: 18929 - protein, 58 aa, Artificial Sequence
  Synthetic
DEERRAEEINRRNKKDSDRLAETIEKILKEDEDRDKELHDRLEEILKELRKRLEEEGK

SEQ ID NO: 18930 - protein, 55 aa, Artificial Sequence
  Synthetic
EELVKELEKINEELRRDIKRLIDEIRENTERLERMIRELEKKIRKILKELDDRAK

SEQ ID NO: 18931 - protein, 55 aa, Artificial Sequence
  Synthetic
DLEKELTDLMKKHAEENDRLRRRLEELLKRHAEENDRLRDRVRRINEEVEEILRR

SEQ ID NO: 18932 - protein, 59 aa, Artificial Sequence
  Synthetic
EDVIREALERIKRISDESKRTIDEVVKEIEKITKESRDLITKYERDVERSIEEAERRAT

SEQ ID NO: 18933 - protein, 60 aa, Artificial Sequence
  Synthetic
SLEERIRELLKRHEDLTRKLKKENDESLRRHRELTKKLRKELEELLKRAEDVLRDLEREG

SEQ ID NO: 18934 - protein, 59 aa, Artificial Sequence
  Synthetic
AREVDDLLRKIEDISKKSADRNRELNEELEDISRRSKEEMKKLLDELRRDVEEIKKRTK

SEQ ID NO: 18935 - protein, 60 aa, Artificial Sequence
  Synthetic
DLEDRIRRLLEESKKNLDELKRRNEESLKRSEDLLKDLKRKLDDLLRKAEEVLRELRKRG

SEQ ID NO: 18936 - protein, 59 aa, Artificial Sequence
  Synthetic
ARDVDRLLEDVKRISDTVHKRNEELNRRLREISERAREAVEDLLRRLEEIVRRIKTRTE

SEQ ID NO: 18937 - protein, 60 aa, Artificial Sequence
  Synthetic
EEIERILEKLRRDLEEVRKKVKKVLDELRELTEELKRKVEKVLRELKRLSEEIARRVEKG

SEQ ID NO: 18938 - protein, 55 aa, Artificial Sequence
  Synthetic
RELRTVAREIREELKKLREELDKLLREHRETSKELEKRLKEVLDRHRELSDRLRR

SEQ ID NO: 18939 - protein, 59 aa, Artificial Sequence
  Synthetic
DELREMIRKVREINERSKDEIRKILEAIKKIVEDHRRVVEKLLRDLKDIVRRARETRSR

SEQ ID NO: 18940 - protein, 59 aa, Artificial Sequence
  Synthetic
EEARKRLEDLSRENKRSLDELRKRIDDILDENRRAVEESRERAKRVLDEVRETLKRDEK

SEQ ID NO: 18941 - protein, 60 aa, Artificial Sequence
  Synthetic
SEVDEVEKRIREAIKRHRDRVKKIIDEIKKLLDDHRRRVKKLEDDLKKRADDVRKETKDG

SEQ ID NO: 18942 - protein, 59 aa, Artificial Sequence
  Synthetic
KEARDRIRELLKKYEDDLRRSEKEIEDILRRYERELRESEKRMREVLKRLEDELRRAEK

SEQ ID NO: 18943 - protein, 60 aa, Artificial Sequence
  Synthetic
DEVKEVEKKIRKVLREHKKLVEELIRKIKEMIDRHKEIVERIIRTIRRELKRAEELARKG

SEQ ID NO: 18944 - protein, 59 aa, Artificial Sequence
  Synthetic
EEMEKRIEDLLREYREELERSRRELERLLEEYEKVVDESRKRIKTILDEVEKLLRDLDR

SEQ ID NO: 18945 - protein, 56 aa, Artificial Sequence
  Synthetic
SSRERFKELSDRNKEVVERSRRRLEKLLEENKREVEKSKKRIEDMLRKADDLLRKL

SEQ ID NO: 18946 - protein, 55 aa, Artificial Sequence
  Synthetic
ERLSEEIKRLIETHEKLLRELEKKIRDLIRKHREDVERIIKEIDKLLKKIDEDTR

SEQ ID NO: 18947 - protein, 57 aa, Artificial Sequence
  Synthetic
SEEETLDELNRENEELLRRSKERLDRSHEKLKKILDDISERVKELLKRAEKLLRDEN

SEQ ID NO: 18948 - protein, 56 aa, Artificial Sequence
  Synthetic
KDRVSDRIRRLLEEHERVVRELLESNDRMAERLRRVAEELVKEIKKELDDLRRRTT

SEQ ID NO: 18949 - protein, 56 aa, Artificial Sequence
  Synthetic
SEEETLERLLRKNEEELKKSKERLKELNRTNRKELRDSERRIKRALEEVEDLIRRE

SEQ ID NO: 18950 - protein, 56 aa, Artificial Sequence
  Synthetic
KDEVTKTIERIIEEHRRMIEELIKEIRKLIKEHRDKVRELLKRIKDILRRLKEERR

SEQ ID NO: 18951 - protein, 61 aa, Artificial Sequence
  Synthetic
SLDERIDELRRTLEEMLDRIRRSNEEVLRDSRRVLEEIDERARRVVEEAEKLLREIDKRKG

SEQ ID NO: 18952 - protein, 59 aa, Artificial Sequence
  Synthetic
EEDIKRLLEKVREIIEELKRRNDELNKRIKDLSEEMRRRVKKLLDEIKEDLERIKRRAD

SEQ ID NO: 18953 - protein, 61 aa, Artificial Sequence
  Synthetic
SLEEEIKELIKRAEEVLERLARSNKEVLDRSRKVLKELRETNKRLLEELKRALDKIRKDKG

SEQ ID NO: 18954 - protein, 59 aa, Artificial Sequence
  Synthetic
EEDIKRLLEEVERIIRKLAEENKKLNKEIEDLSRRARERNERLLREVEKIIRDIRERAR

SEQ ID NO: 18955 - protein, 58 aa, Artificial Sequence
  Synthetic
SEVEELTKKAKKIIEDHRRYVEKSARDVERLIREHERYVEESAKKVEKLLREIKELDK

SEQ ID NO: 18956 - protein, 56 aa, Artificial Sequence
  Synthetic
KDKIRELERENEEVIKESRERSERLARKNKKVLEDSERRSRELSERVERLLDESRR

SEQ ID NO: 18957 - protein, 56 aa, Artificial Sequence
  Synthetic
REEDVLRKLEKEIRDLLERIKRKSEELIERNKRTNDDIRRRSKETIDELRELTKRV

SEQ ID NO: 18958 - protein, 56 aa, Artificial Sequence
  Synthetic
DEDIRREAERLLREMEKRAKENEEDVRRNLKRLRDALKEHKEKVEKLLEEIKKDAK

SEQ ID NO: 18959 - protein, 56 aa, Artificial Sequence
  Synthetic
SETDDIIRRIRRLIEELLRNSKRTSDDNRRTLEELERNSERAIKKIKDVLEKLSRD

SEQ ID NO: 18960 - protein, 55 aa, Artificial Sequence
  Synthetic
EKAEKIRKELEDMARESRKLMRENKREVDRVEKKSRKLLKDILDEIDKVDEDEKR

SEQ ID NO: 18961 - protein, 57 aa, Artificial Sequence
  Synthetic
SEAERIAREVERVLREIEEEVKRLSEENRELVERIERESRKSIEDIERRLEEVKRKV

SEQ ID NO: 18962 - protein, 56 aa, Artificial Sequence
  Synthetic
RRLLEALRREVEEVLKRIRETLEENRRRNEEVLRRDKELLERIRDKIRRVLEELKR

SEQ ID NO: 18963 - protein, 60 aa, Artificial Sequence
  Synthetic
DEERELRKLERELEDVVRKDRKILEDLRRTLDTVRREDERILRELEETLKEVVKRVREKG

SEQ ID NO: 18964 - protein, 56 aa, Artificial Sequence
  Synthetic
IRRISEEAKELLKRWEDESRKVEEEHRRSLEEWRERSERIAREHKKSLEKLEKDVE

SEQ ID NO: 18965 - protein, 56 aa, Artificial Sequence
  Synthetic
SIEELLKKLEEDIERVLRKSEELLKRNEEENKKVLDESKRLLDELKKRAEKVLREL

SEQ ID NO: 18966 - protein, 59 aa, Artificial Sequence
  Synthetic
EEVLKEIVKRVRDDIERHDRESKKLSDENKRVVDEHRKRSEELARKLEELLREIRERVT

SEQ ID NO: 18967 - protein, 59 aa, Artificial Sequence
  Synthetic
SDIEKLAEEVDRLNKELTDRLERLREEHKRTLDEIRKTLEKLKREVDKELEEVKKIVKD

SEQ ID NO: 18968 - protein, 59 aa, Artificial Sequence
  Synthetic
ERVKKILDDLKRKNEENDERVERIMRELRERNRKLNEEIDKIVEDIRREVEKVSREARR

SEQ ID NO: 18969 - protein, 59 aa, Artificial Sequence
  Synthetic
DAVDRVREENKKDSERNKKRVEDVKRRAEERSRRNKKKVKELRDRNREEIKRIKELKDR

SEQ ID NO: 18970 - protein, 56 aa, Artificial Sequence
  Synthetic
RKVEEESRRSFKRNKEENKKVRDEIKKTIEENEAENRKAHEDSKRSFEELEDELRK

SEQ ID NO: 18971 - protein, 60 aa, Artificial Sequence
  Synthetic
DKEREATRRLRELEKENTKLVKEIRDADREIEKRLREIHKKLEDENRKLEEEIKDMVRRK

SEQ ID NO: 18972 - protein, 54 aa, Artificial Sequence
  Synthetic
RIVEEVKKHHERNERRLREYLDESRKYLEDHIRRLEKYLEDSRRLATRIKEETK

SEQ ID NO: 18973 - protein, 57 aa, Artificial Sequence
  Synthetic
SSVEEVKRKNEKSLREIERASEEHLERLKRELEKSEDEARKHNKKLDDDLERLERKG

SEQ ID NO: 18974 - protein, 58 aa, Artificial Sequence
  Synthetic
ERVKDLERTHEESKRRVEELMKENDDLLKRIEEESKRLNEENERKVEDIEKKVEDLKR

SEQ ID NO: 18975 - protein, 59 aa, Artificial Sequence
  Synthetic
SEIERVAKELKDEADRLRKEVEKHRRRSKEELDRLREESKKVNEDLKRMLERIREIAAQ

SEQ ID NO: 18976 - protein, 58 aa, Artificial Sequence
  Synthetic
EEFKKLRDLIEDIKRRLEELVKALEETNKKIEDDVRDSVRKNRETLERIKKEIEDTAT

SEQ ID NO: 18977 - protein, 61 aa, Artificial Sequence
  Synthetic
KDVERILREIRETLRRVEEEAKRSNDEIRKLNEEAERIVREILKEIEKELREVRKRLTEKG

SEQ ID NO: 18978 - protein, 59 aa, Artificial Sequence
  Synthetic
DELLRRLKEELDRVERTIRELIRRNEEVLERSDESVEKLLRELEELLRRVEEEIKKAAT

SEQ ID NO: 18979 - protein, 60 aa, Artificial Sequence
  Synthetic
SEREERAKRLRKILEDLKRESEEHLRRLKTRLDKLREDSKKHLEDVRRKLEDLKRIVEEN

SEQ ID NO: 18980 - protein, 55 aa, Artificial Sequence
  Synthetic
DELRKLVRKVEEDLKRLDEENKKLLEKVKRDLDRLKKENKDLLKRVEEELRREAT

SEQ ID NO: 18981 - protein, 60 aa, Artificial Sequence
  Synthetic
SEEEERKRRLEEKLERLEEKSRRHLKEVKRTLEELEERSRRHLDENRRLLKRLKEIVDRN

SEQ ID NO: 18982 - protein, 55 aa, Artificial Sequence
  Synthetic
EEIKKLVKDIKEELKRLLEENKRLLEEAKKTLKKLLEDNRRLIEKIKKELDEARK

SEQ ID NO: 18983 - protein, 60 aa, Artificial Sequence
  Synthetic
REEERLKRELEKDLERIKKLSDEHKKRLEEENRDLRRKSREHKEKLERDLRRVEEIRRRE

SEQ ID NO: 18984 - protein, 55 aa, Artificial Sequence
  Synthetic
DEVERLLKEIEDRVRKLEKENEEIARRSTETLEKLLKENRETLKEIRDRVREAKR

SEQ ID NO: 18985 - protein, 60 aa, Artificial Sequence
  Synthetic
SEEEELKRRLKEILRELKELSERHKKRLRELNEKLKRLSEEHKRKLEEITEDLRRIATRE

SEQ ID NO: 18986 - protein, 55 aa, Artificial Sequence
  Synthetic
EEVKRLLDEIRRELERLKEENRKIVEDSTRTLKELLEENKRILEESSRDLERLKR

SEQ ID NO: 18987 - protein, 60 aa, Artificial Sequence
  Synthetic
SEEEKIKEEIKRDLEDLRRLSKEHKDRLRKLLEDIKKLSEEHKDKLRRITKELRDVVRRE

SEQ ID NO: 18988 - protein, 55 aa, Artificial Sequence
  Synthetic
EEVKRLLEKVKEDLKRLLDENKRIIERIEREVERLKRENEEILKESSRDLERAKK

SEQ ID NO: 18989 - protein, 60 aa, Artificial Sequence
  Synthetic
SKEEKLKEDLKRTLDDARRLAEETKRRLEEILEKLKRLSEKSKEDVKRTTDELRDIVRKR

SEQ ID NO: 18990 - protein, 55 aa, Artificial Sequence
  Synthetic
EEIKDLLRRIREELKRLKDELRRIIEEIRKELERLKRENEELNRRSSEELKKAKK

SEQ ID NO: 18991 - protein, 57 aa, Artificial Sequence
  Synthetic
SEVEELLERHKRALDKAKKVSEDHKRDLKEKLDDVKRKVEELERRLKRALDELTKEG

SEQ ID NO: 18992 - protein, 59 aa, Artificial Sequence
  Synthetic
EDLVRTLDELHKDIERRLRKLEEENRDILRRIREEIERLKRKLDEIARRIKEEVKKLKK

SEQ ID NO: 18993 - protein, 57 aa, Artificial Sequence
  Synthetic
SEVEELKKEHKKVLDEVRRASKKHKEELEEMLRDLKRKADELARRLEDALRRLEEEG

SEQ ID NO: 18994 - protein, 59 aa, Artificial Sequence
  Synthetic
KKAVDELRELHKEIKRRIEKLLKENEEILRKIEEDIERLLEDLRRKAEEIKRRVDETRR

SEQ ID NO: 18995 - protein, 57 aa, Artificial Sequence
  Synthetic
SEVEEIEKENKDAVRRMREKSRRHKEELKDALREAEEISRRHKEELKRKLEELTKRG

SEQ ID NO: 18996 - protein, 59 aa, Artificial Sequence
  Synthetic
EELVRKLRRLDKRTHEDVRRLLDENRRTLEKIEEDIRRLIKENEDTLREIEKRVEDKKR

SEQ ID NO: 18997 - protein, 59 aa, Artificial Sequence
  Synthetic
SEDEELKKEIEKLLRELRKRSTESKKEIEDLLDELRRKSERSRKEIEDTLRELEERAKG

SEQ ID NO: 18998 - protein, 55 aa, Artificial Sequence
  Synthetic
EEIKELLERLRRDAERLKKENEDLNRRLREEVEKNKEDNKRLNEELRKKVEEDRR

SEQ ID NO: 18999 - protein, 61 aa, Artificial Sequence
  Synthetic
SLEETLDKILEDIRRRIRENEERNRRLKEEIDKAIKRNEEENRKTNEDIKRKIDDLERKRG

SEQ ID NO: 19000 - protein, 59 aa, Artificial Sequence
  Synthetic
KKEVEELIRELEDELRKLEERSKEHLDRLREELKELDERSKKHLDELRKLEEKLRRDAD

SEQ ID NO: 19001 - protein, 60 aa, Artificial Sequence
  Synthetic
SETEKLLERIRRNVEENEKYAREHLKKLDKNLKDNKEYIDRHVKKLKERLDTLREIAREK

SEQ ID NO: 19002 - protein, 55 aa, Artificial Sequence
  Synthetic
ERIEKLLRELERTHRELKEELDKLHKRLEEEHRRLEKKLRDIHRKVEKDLRDLKR

SEQ ID NO: 19003 - protein, 60 aa, Artificial Sequence
  Synthetic
EEKERLKKRIRDNVEENKKYAEEHLKRLKEKLEEVRKYIEDHKDRLRRKIEELKKDAERK

SEQ ID NO: 19004 - protein, 55 aa, Artificial Sequence
  Synthetic
EEIRRILEELRRTHKKLEEELEELHKRVEDELRRLEDELREIHERLEETLRRLRK

SEQ ID NO: 19005 - protein, 60 aa, Artificial Sequence
  Synthetic
SEKEKLKEEIKRNVEENRRYVEEHKRDLERNAEENEKYIREHLKRLKEEAEEVRDRVAKE

SEQ ID NO: 19006 - protein, 55 aa, Artificial Sequence
  Synthetic
KEIERLLRELERTHRELRKDLKRIHDELKKKHDDLRRTLEEVHKRVKEELDRARR

SEQ ID NO: 19007 - protein, 60 aa, Artificial Sequence
  Synthetic
SEKEELIERIRRNLEENRRYIERHLEELEKKLDDVRRKAKRHLEKLREELEKLKDDARKK

SEQ ID NO: 19008 - protein, 55 aa, Artificial Sequence
  Synthetic
EEIRKLLEELRKTHEKLKRDLERLHKKVRDTLKKLEDELKELHKRVDDELRKLRK

SEQ ID NO: 19009 - protein, 60 aa, Artificial Sequence
  Synthetic
DEERKLEELEKENDKLLEDAKRTLEKLLKDNRDLVKRVEDELRRLEEENKKLADDVRRDG

SEQ ID NO: 19010 - protein, 56 aa, Artificial Sequence
  Synthetic
SKELEDRSREHLERLKARLKELEDKSRKHLEEVKKELRELEEKSKKHLKRLEDARR

SEQ ID NO: 19011 - protein, 60 aa, Artificial Sequence
  Synthetic
DEEETLKRLDEENDKLLEEVKKTLEDSLRRLEELHKRTEEELRKSRRELRELVKDVERKG

SEQ ID NO: 19012 - protein, 56 aa, Artificial Sequence
  Synthetic
KEELRDKSRRHLEDVKRRLEELKKSNEEALRRDEKKLEDLRRSNEKVLRELKEKAR

SEQ ID NO: 19013 - protein, 60 aa, Artificial Sequence
  Synthetic
SEEEEVRRLEEELKKLHDDIKRRLEELLRENEKILRDIDREIKKLLEELRKTIDKADKDG

SEQ ID NO: 19014 - protein, 56 aa, Artificial Sequence
  Synthetic
KDELRKIVEELKRDHEKDLRKVEKLSEEHKEKLRRALEELKRLAEEVKKRLDDERR

SEQ ID NO: 19015 - protein, 59 aa, Artificial Sequence
  Synthetic
SVEERLEEMERRNKDLIRRVEEDLERLLKENRDLIRRIKEELKRLKEELKELVERISRE

SEQ ID NO: 19016 - protein, 59 aa, Artificial Sequence
  Synthetic
EEVLKELEEENRKHEKRLRDALERLRRRSKKHKDEARKILEELKERAKTIKRRLEEDRR

SEQ ID NO: 19017 - protein, 60 aa, Artificial Sequence
  Synthetic
SVKEDLRKAKEENKRLIEKAEDDLRKLLRENKELLKRIDEELKRLKKELDDIVRRIEDKG

SEQ ID NO: 19018 - protein, 59 aa, Artificial Sequence
  Synthetic
EEVLEKLKRDNEDHKRRLKEDLRRLREESKKHKKKLEDRLKKLEERARRIKEKLKEEER

SEQ ID NO: 19019 - protein, 62 aa, Artificial Sequence
  Synthetic
DDEERIRKIAEDIKRKLKETLERLRDESRKNKRKLEDLLRKSEEKAKRLKDKLRKMEEEKER

SEQ ID NO: 19020 - protein, 55 aa, Artificial Sequence
  Synthetic
EDVKRLLRELKEITDRIDEEVKRLREENERITRRIEEEHKRLNKELERILREIER

SEQ ID NO: 19021 - protein, 57 aa, Artificial Sequence
  Synthetic
SSEEKAKELRKRLRETHKRVKDEIKRLKEELEESHKRLEERSRETLRKLEELIKELN

SEQ ID NO: 19022 - protein, 56 aa, Artificial Sequence
  Synthetic
DTELEKDVRRVEEKNRRALEDVRRKVEEVKESNKRALEKNERIVREVERRLREEKK

SEQ ID NO: 19023 - protein, 57 aa, Artificial Sequence
  Synthetic
SSEERFEKLDRELKRTHEELERAIRELKKDYERSLKRVEEELKRLLDELEELARRVG

SEQ ID NO: 19024 - protein, 56 aa, Artificial Sequence
  Synthetic
DTKVTETVRRVREENKRMLEDVKRDVDRLRTSNEKVLRDIRRTVKRAKERLKELKE

SEQ ID NO: 19025 - protein, 60 aa, Artificial Sequence
  Synthetic
SAEDELRRLRRELEKSHEELKRRIDELLKRLRELVKRVKDRSKELLDELRKLLEDVKRKG

SEQ ID NO: 19026 - protein, 56 aa, Artificial Sequence
  Synthetic
DTRVRERVKETRRRNEEVLREVERIAKEVEDDLKRILEELEDNVRRVKKKIKDVER

SEQ ID NO: 19027 - protein, 60 aa, Artificial Sequence
  Synthetic
SSEEELKKLEKELEETHRKLKEDVERLLRDLDRKVKKVEDDSKKLLDELRKLLEEAKRRG

SEQ ID NO: 19028 - protein, 56 aa, Artificial Sequence
  Synthetic
ERDVRKRVKEMKEDNRRALEDIRRKTEEVAKKLREILKKLRENVRRVAEEIKRVAD

SEQ ID NO: 19029 - protein, 60 aa, Artificial Sequence
  Synthetic
STEEELERLRRELERTHERLREESEKLVRELRKLVEEVREALERLRRDLKRLLKEVREKG

SEQ ID NO: 19030 - protein, 56 aa, Artificial Sequence
  Synthetic
ETEVREEVKRTKEENKRVEEKLRRNVDEMRKKLEEILRRIKEEIDKMRRKIEEIER

SEQ ID NO: 19031 - protein, 60 aa, Artificial Sequence
  Synthetic
DVEEDLKRLEKKNRDLNKRMEDSNRKLEEDDERVNRKIRKDHKKAEDDLRRVIKEVEEEN

SEQ ID NO: 19032 - protein, 55 aa, Artificial Sequence
  Synthetic
EKTIEDIERHLDRLRKENDKLRKELEDHIRRLEEEVRKNLDRIREEIERARERVR

SEQ ID NO: 19033 - protein, 59 aa, Artificial Sequence
  Synthetic
RAEDEVRKIKKEIDELIRRLEKLNEDIKREIDELVRRLEELNKRVKEEIKRLIEELKKE

SEQ ID NO: 19034 - protein, 56 aa, Artificial Sequence
  Synthetic
DRELKERLDRMRDHARKHEEKLKESLKRVREHVKRHAERVEESLRRLKRDVDELRK

SEQ ID NO: 19035 - protein, 57 aa, Artificial Sequence
  Synthetic
SSDEKLEEIERHHRKVEEESRRLDEDIKRHHKEVEDESRELLERIKKKLEDVTRALG

SEQ ID NO: 19036 - protein, 55 aa, Artificial Sequence
  Synthetic
DEILEKLERDNRRYKEESEEEVERAKEENRRYLEESRREVEEFDRKLKEIADRAR

SEQ ID NO: 19037 - protein, 57 aa, Artificial Sequence
  Synthetic
SELEERVKKVEKVNEDLKRRVEEHERRVKRTLERLEEEVRRHAEKVKKRLEELRRLA

SEQ ID NO: 19038 - protein, 59 aa, Artificial Sequence
  Synthetic
ERIEDLLRRLDDRNRETEREIEERHKRLKEELDKVEERIRREHEKLKRELEEVERRTRK

SEQ ID NO: 19039 - protein, 60 aa, Artificial Sequence
  Synthetic
DVVDELRRIAKEVRDRLREIVERLDRIAKEVVKENEEVVRHNDELAKRVVTTAKRIVDEV

SEQ ID NO: 19040 - protein, 58 aa, Artificial Sequence
  Synthetic
EEVKRVVETVRKLLRDAEKEIEEVVKKVRDLLRRVNKELKESVERVRRLLEEVRERAR

SEQ ID NO: 19041 - protein, 61 aa, Artificial Sequence
  Synthetic
SDLDRVLRKIEELVREIEKESERTNRKSERDTEEVARRSEDSDRDIERLVREIRDRLRKAG

SEQ ID NO: 19042 - protein, 59 aa, Artificial Sequence
  Synthetic
KDVVRELEEIVKELEERAKENVKRSEKSVKEDLDVLADNVRRSKEIVEEIKKRADEVVT

SEQ ID NO: 19043 - protein, 57 aa, Artificial Sequence
  Synthetic
SEKEKVIKEARELLERLRKRLKDVNDDVTRLLDELRKENEKSREDVEREVKRLEEEV

SEQ ID NO: 19044 - protein, 56 aa, Artificial Sequence
  Synthetic
AEELKRVADRLRRRLERLVEENERVVKKILDEIRRSVEENKRIVDKVRKDLDERRK

SEQ ID NO: 19045 - protein, 57 aa, Artificial Sequence
  Synthetic
DEDEKVLRKIEELVRRLHEKNRKVLEESKRTLEKVEERLRRVLKEIEDLVRDAARRV

SEQ ID NO: 19046 - protein, 56 aa, Artificial Sequence
  Synthetic
VSELDKIIKELKREADESVKKLKEIVKRSLDHLEEVVKELKKRLDDLKREIDTKAK

SEQ ID NO: 19047 - protein, 59 aa, Artificial Sequence
  Synthetic
SLEEEVKKVVEEIKRRIEDDVRRIRELVERIKKLIEKDVTDLKRVVDENRDLAEKAKRI

SEQ ID NO: 19048 - protein, 55 aa, Artificial Sequence
  Synthetic
EELLRELRRVLEEAREDSRRLLEEIRKVLEEAEEKSRRVLEESKRVNDELRERLR

SEQ ID NO: 19049 - protein, 59 aa, Artificial Sequence
  Synthetic
SLDESAKRVLEEIKRLAKEDLDELKRVLDEIKEILREVLEANRDSVRRIEEEVEKLARV

SEQ ID NO: 19050 - protein, 55 aa, Artificial Sequence
  Synthetic
DRVLEEIERVIRKIEEDSRRLLKEIADVIKKVREESKRLLDDLKRVIDELRERAR

SEQ ID NO: 19051 - protein, 59 aa, Artificial Sequence
  Synthetic
SLEEVLDRVRRESDKVRKTLERVKEEVERVSREVVEDLKRVEEEVRRLIERVKDILRRS

SEQ ID NO: 19052 - protein, 59 aa, Artificial Sequence
  Synthetic
EELIRDVLREAERLVKESLDDIRRLLDEVRRLVEESRRNIERLLEEVRRLVEEIERAAE

SEQ ID NO: 19053 - protein, 60 aa, Artificial Sequence
  Synthetic
DKVDEVLKRVKRVVEEIEDRVRKLNKEVRDVVKRIEELAREVLDHSRKVVEEIKKTAEDR

SEQ ID NO: 19054 - protein, 56 aa, Artificial Sequence
  Synthetic
EEVVRTVKEELDKALEKAERVLEHSRRMLERVLKEAKRVLDEVKELNKRVIDEVRR

SEQ ID NO: 19055 - protein, 56 aa, Artificial Sequence
  Synthetic
SVEDVAREVDKLLKRANEESKRVLEEVERLLRTVSRELEKVIRDVKKLIDDVEKRV

SEQ ID NO: 19056 - protein, 59 aa, Artificial Sequence
  Synthetic
SETAEKVLRDVERIVRRNEELVREVLRRVKKIVDENRKIAEDALRKVEELVKELEERAR

SEQ ID NO: 19057 - protein, 59 aa, Artificial Sequence
  Synthetic
SEAEEALERVKELVKRSEELAEESLRRARKSVEEVARRAEEALERVKKSVEEVKEVRKE

SEQ ID NO: 19058 - protein, 56 aa, Artificial Sequence
  Synthetic
KEVLDKVRDLVRRVDEENRRVIEEAKKLSEDVARRVDKVIKDVERLSKRVEDEVRR

SEQ ID NO: 19059 - protein, 58 aa, Artificial Sequence
  Synthetic
DEDRRAVEELRRVVEEVNKLNEDTLRELERIVRENIRRVRELLKEAEDVVREVEKEVR

SEQ ID NO: 19060 - protein, 55 aa, Artificial Sequence
  Synthetic
EEVLREAKDLIDHVRKTIEEVNDTVRDLVRKVHEVNKEVLDRIRKLVEEVRKTVE

SEQ ID NO: 19061 - protein, 61 aa, Artificial Sequence
  Synthetic
SSLDRVRRAIEELVKKVNTDSKRVKDRVRKLLKEVNDTSDRVRRDVKRKLDKVKDDARKAG

SEQ ID NO: 19062 - protein, 59 aa, Artificial Sequence
  Synthetic
DRVVERVVREVERIVRENEELVKEVVRRAEEIVERNERHSRELLRRLAELVDDLRRKIE

SEQ ID NO: 19063 - protein, 61 aa, Artificial Sequence
  Synthetic
SSLDEVRKRVTELLKKVDDTSKKVEDDVKRLLDKSTRTSDEVRKAAERLLEEVEESARRKG

SEQ ID NO: 19064 - protein, 59 aa, Artificial Sequence
  Synthetic
DEMVKRVLEELKKIVDDLERHSRKLLKDARRIVEESIEHSDRVLKEATRIVEKLERDIR

SEQ ID NO: 19065 - protein, 59 aa, Artificial Sequence
  Synthetic
DEIEEVLREMRELVERNVREIEKVVRENEKLVEDNIRLVREVAKELRDLVRKLIERVAR

SEQ ID NO: 19066 - protein, 58 aa, Artificial Sequence
  Synthetic
EELEEVVKEARRLLKKSEEDLRRVEKRVEELNEKSKEEMERVRDDVRRLLEEVKERAR

SEQ ID NO: 19067 - protein, 60 aa, Artificial Sequence
  Synthetic
SEVDELLRLADEIVRELRELVRRHDEIVDKLVEENRRIVEEHLRRVEDVVRRLKELVKKI

SEQ ID NO: 19068 - protein, 58 aa, Artificial Sequence
  Synthetic
EEAERVVKEARRLLREIEELVKRSVERVERLHREVHERIKESTKRVEELVDEVRKAVK

SEQ ID NO: 19069 - protein, 60 aa, Artificial Sequence
  Synthetic
SAVDEVRKVIKEIFDRLAELLKHNSDMVRRLLEEIRELVKNNTEIVREVLKKLEDILREL

SEQ ID NO: 19070 - protein, 59 aa, Artificial Sequence
  Synthetic
EEKLEKVAEDARRAIKDIEDKLRDSNRRLDKLIKEVRRRLEESHKRIEREIKEIEERVR

SEQ ID NO: 19071 - protein, 61 aa, Artificial Sequence
  Synthetic
DKLDEVKEAARRVVEEAHKKNRRVLEKLDEVSRRAHELDKRVKEKLKEVVKRADDLLKEKG

SEQ ID NO: 19072 - protein, 60 aa, Artificial Sequence
  Synthetic
VDTLVERLRRLVEELRKHSDDTVRRMEDIVRRNKKHSEESVRKMDDIVKKLEELAREVVR

SEQ ID NO: 19073 - protein, 61 aa, Artificial Sequence
  Synthetic
DRLDKVKEDLKRSSEDAHRKNKEAIELLDEVSTEAHKLDEDVRRKLEKVVREVRKLLEDKG

SEQ ID NO: 19074 - protein, 60 aa, Artificial Sequence
  Synthetic
IDTIVRDAEKIVEDNRRHSDETVRRIERLVTENLRHSEESVRTLDRLVEELLRTAEEVVR

SEQ ID NO: 19075 - protein, 61 aa, Artificial Sequence
  Synthetic
DKLERVLRELERSSKEAHEKDKKVLEDLDEVSKRAHKANEEVIARLEDVVRKAEDELRKKG

SEQ ID NO: 19076 - protein, 60 aa, Artificial Sequence
  Synthetic
LDTLVKRIEDIVKENEDHSRRSVEEIRRIVEENERHSRESVKTIKDLVEELERRAEEVVR

SEQ ID NO: 19077 - protein, 61 aa, Artificial Sequence
  Synthetic
SELEKVLKDLEESSKEAHKADEEVLRRLERVSREAEKELKRVLDDLRRVVEEVERLLREKG

SEQ ID NO: 19078 - protein, 60 aa, Artificial Sequence
  Synthetic
LETLVRDARRIVKENEEHSRDSVRRIDKIVKENADEVRRVVKEIKDIVKRLEELARETVR

SEQ ID NO: 19079 - protein, 56 aa, Artificial Sequence
  Synthetic
SLDEDVDELVKRVEEEMRRNVKELDKLVKEDKRLAEENVRRLEEIVDRSRKLADRK

SEQ ID NO: 19080 - protein, 55 aa, Artificial Sequence
  Synthetic
EEVLKRLREVIERARRDSERVLRKLEKTTDKVRRDSERVLRENEKSIEDVARKMT

SEQ ID NO: 19081 - protein, 61 aa, Artificial Sequence
  Synthetic
DELERLLEELKRTTRKIEEELKEVNRRLDDTTREAEKELRRLKEKLEEVVKRAEELLRRRG

SEQ ID NO: 19082 - protein, 60 aa, Artificial Sequence
  Synthetic
EKDVVKRLEDLVRDDDRIAKEDVKRLEDLVREDRTLVKEIVDRLEELVRTVEKLVKEVVN

SEQ ID NO: 19083 - protein, 56 aa, Artificial Sequence
  Synthetic
SAIEKVKEVVERVLETVRDSVRRSHEESKRLIDKVRKRLEEVREEVKELIERVRRK

SEQ ID NO: 19084 - protein, 59 aa, Artificial Sequence
  Synthetic
KDAVEDVLRRIEELIRDLNKKNDDNVRRVKEVIDRAEKLVRDLLREIRKLIEKLIRDTE

SEQ ID NO: 19085 - protein, 57 aa, Artificial Sequence
  Synthetic
SVLEEVRRRVEELLKTVKESVDRSHERSERLIEEVRESLKEVKRRVKELVERVREKG

SEQ ID NO: 19086 - protein, 59 aa, Artificial Sequence
  Synthetic
DKVARDVLEEIERLIREANERNKRNLEDVERVIRELNKENERVLREVEKKIEKLIRETE

SEQ ID NO: 19087 - protein, 57 aa, Artificial Sequence
  Synthetic
SSIERVEKEVRRLLRESDESLKRVMEEAKELIKSVRESTKRVEEDARDLLRKVVERT

SEQ ID NO: 19088 - protein, 59 aa, Artificial Sequence
  Synthetic
EEEVERVLEEVRRIIEKLKEDDKRSLERIERIVRRNNELNKESVDRIRKIIKEMEERAD

SEQ ID NO: 19089 - protein, 57 aa, Artificial Sequence
  Synthetic
DESEDVEEKMRRLLEKSKDETRRVKEEVERLNEESKRVTEEVEKRVRDLLREVREKV

SEQ ID NO: 19090 - protein, 56 aa, Artificial Sequence
  Synthetic
VETVLREAKRLIEESIERIERVLKENRELAERSIKVLRDVLREVEDLIRKLEERAK

SEQ ID NO: 19091 - protein, 56 aa, Artificial Sequence
  Synthetic
RKVEEVKKEAERLLRRSEEVSKKVADDADRLLKRSREVSDRVRRESERLLKEVAEA

SEQ ID NO: 19092 - protein, 59 aa, Artificial Sequence
  Synthetic
DKRVEDVLREARDLVRRSIKKIDEVLKEAKRLVEESIKLSEDNVRRNEEIIRDLERRTR

SEQ ID NO: 19093 - protein, 56 aa, Artificial Sequence
  Synthetic
SAVERVKEEVDRLLERSKKESERVRKESEDLIRESDEVSRKVEEDSRRLIEEVERS

SEQ ID NO: 19094 - protein, 59 aa, Artificial Sequence
  Synthetic
ERVVTRLLEEAKRLVERSIEEIKRNVKENRKLVEESIKLSEENVKRNKRLVDEAIRAAE

SEQ ID NO: 19095 - protein, 61 aa, Artificial Sequence
  Synthetic
SVVEEVVERVKRIAEELKRSSEENVDTVRKVVAEAKKLVEDDVREVEKLARRLKEVVTRDI

SEQ ID NO: 19096 - protein, 59 aa, Artificial Sequence
  Synthetic
ERVLKDVKDKADKLIREVEETSKRSEEDVRKVIEEVREVLRESHERVKELIKEVREAER

SEQ ID NO: 19097 - protein, 60 aa, Artificial Sequence
  Synthetic
SEAEKVAEDARKLAEEVIRLIEEVVERSKELVDRNEKEIRRVIEESDKLVEEVIRLLRRG

SEQ ID NO: 19098 - protein, 58 aa, Artificial Sequence
  Synthetic
ESVREVEKIVRDVVREIREMLKRSKDETRRVIKRVREVNDRSEKRSRDVVREARETSR

SEQ ID NO: 19099 - protein, 60 aa, Artificial Sequence
  Synthetic
SEAEEVARRARKLVRELEELIRKSVEDSRELVKRNIEKIKRNVRKSEEDVDRVIKLLRRG

SEQ ID NO: 19100 - protein, 58 aa, Artificial Sequence
  Synthetic
EAVREVDRIVKEVVRRVREALERSREETRRVIEEAKKANKESDDVSRKVAKEIDEEAT

SEQ ID NO: 19101 - protein, 57 aa, Artificial Sequence
  Synthetic
RVIEEVDKEIKRVIKESEDVTKEVKDTSRKVLEDSKRESERVRRRSEEVLKKVEEEG

SEQ ID NO: 19102 - protein, 59 aa, Artificial Sequence
  Synthetic
EDEVRRVAEKVKRLVDESIKRLKDNVKRNKELVDESIREVERNVEENERLATKVIEEAK

SEQ ID NO: 19103 - protein, 57 aa, Artificial Sequence
  Synthetic
SVIERVEEEMEKVIRDSERVTKEVEDRAREVHERSEKRIREVEETSRRVLEELRRAG

SEQ ID NO: 19104 - protein, 59 aa, Artificial Sequence
  Synthetic
EEEVKKLAEEVRRLVEDSIRKLEELARRVDELVRESIERVDRNVEENKRLVREAIERRR

SEQ ID NO: 19105 - protein, 57 aa, Artificial Sequence
  Synthetic
SVDREVEEIMRRVHKESEDVIRKVKDTVRRVLERSREVSERVKRDAERVLEEVKRAG

SEQ ID NO: 19106 - protein, 59 aa, Artificial Sequence
  Synthetic
KDFLKRVAEEVKRLVEESIKRVEDVAREVERLVEESIRLLEAVAKKVRDLVREVKRRRT

SEQ ID NO: 19107 - protein, 59 aa, Artificial Sequence
  Synthetic
KEIEDLVKKIREIVDRIKKTVEDSVREVRRIVDESAKSVEELVKELKKLAEELRKLVED

SEQ ID NO: 19108 - protein, 58 aa, Artificial Sequence
  Synthetic
ELIRTVERELREVEKEVKKMLDESTEVLKEVEERVRRMNDDVRRVLEKVARDVERDLR

SEQ ID NO: 19109 - protein, 59 aa, Artificial Sequence
  Synthetic
KEVEEVVTKVDDLVRELEERSRRHVERVKEIADRNEKLVREVVKRSRDNVRELEELVRR

SEQ ID NO: 19110 - protein, 59 aa, Artificial Sequence
  Synthetic
REVLEEVKKRIRDVLKRVEDASKRVKETIDEVLKRIKELTEDVERKSREVLRRVKEARK

SEQ ID NO: 19111 - protein, 59 aa, Artificial Sequence
  Synthetic
KEVEDIIRKLRRHVKEIERTIREMVESVKRLADEVVKVLKDALDSARDHVRKILETLRD

SEQ ID NO: 19112 - protein, 59 aa, Artificial Sequence
  Synthetic
EDVLRELRKVIEDTERTIKRLVDELEKVHREVKERIRKIAKDLRDKHKKSKRDIRETER

SEQ ID NO: 19113 - protein, 57 aa, Artificial Sequence
  Synthetic
SAKDEVKDVNDKVRKEVRRVIEESRAVNEEIKRRVDTVLKESEDVNREVKREVEDKV

SEQ ID NO: 19114 - protein, 59 aa, Artificial Sequence
  Synthetic
EKVAKEIVRKSEDVVRRIVEELKEDAKRSRDLVRELVKEIKEDVKRSRELVKRVVEEAK

SEQ ID NO: 19115 - protein, 60 aa, Artificial Sequence
  Synthetic
REAEELVKRNEKIVTDIRRLVEKTVRDSRRVVEELKREAEETVERSRRVVTKLKELVERG

SEQ ID NO: 19116 - protein, 58 aa, Artificial Sequence
  Synthetic
RMVEEVERTSREVEEEVKRVLKKSRDVTREVEEEVRRLLERSRKETDDVRKRLEEAER

SEQ ID NO: 19117 - protein, 60 aa, Artificial Sequence
  Synthetic
DEAERLVEEIKRVVKEAEDLVRRTVEISRRVVETLRKEAEDLVRDSERVVKELTELARRG

SEQ ID NO: 19118 - protein, 58 aa, Artificial Sequence
  Synthetic
ELVEKVRRVIEEVEKRLRDMLRKSRDVTREVKERVARMLEKSKKVTDDVEKRVTDEDR

SEQ ID NO: 19119 - protein, 60 aa, Artificial Sequence
  Synthetic
KEAEDLVRRVEEVVEELERRVEKLVRESEEVVKKLSKEVKESVDTNRDIVRRITELARRG

SEQ ID NO: 19120 - protein, 58 aa, Artificial Sequence
  Synthetic
EKVEEVERVIRRVKKRVEEVLRKSKTTTTDVERRVREMLERSEESTRRVKERADRERT

SEQ ID NO: 19121 - protein, 59 aa, Artificial Sequence
  Synthetic
SEADDVVREIEDLVRRDKELVDEVVKRIKDLVRRDKKLVDEVVKEIKDLVTELEDLARK

SEQ ID NO: 19122 - protein, 59 aa, Artificial Sequence
  Synthetic
EEMLRKLERVVEEVKRRSTEALKRLREVVKEVKETSKRANEELERVVREVKKRLDDATK

SEQ ID NO: 19123 - protein, 59 aa, Artificial Sequence
  Synthetic
DEVREVVKEIRKLVEDDKRRVDKVVEDDRRLAKRDLDLVEDVVRRIEDLVRRVLEEARK

SEQ ID NO: 19124 - protein, 59 aa, Artificial Sequence
  Synthetic
KSVLDELRKVVEEVKERSDRALEEVERSIRESEKESRRANEKLRKVVEEVRKKLEEAER

SEQ ID NO: 19125 - protein, 59 aa, Artificial Sequence
  Synthetic
SEVDKVVKDIRDLVRRDLKRVEDVVRTDRRLAEEDLRRVKEVVEKIEKDVKELDELARK

SEQ ID NO: 19126 - protein, 59 aa, Artificial Sequence
  Synthetic
ESVLKKLKDVVDEVERESREALRKVEESIKESKRRSEKALEELREVVKRVDRLLEEARR

SEQ ID NO: 19127 - protein, 59 aa, Artificial Sequence
  Synthetic
SEVDEVVKEVEDLVRRNEELVEEVVRRVEKVVTDDRRLVEEVVREIRKIVKDVEDLARK

SEQ ID NO: 19128 - protein, 59 aa, Artificial Sequence
  Synthetic
EKVLRKLEKVIREVRERSTRALRKVEEVIRRVREESERALRDLERVVKEVEKRMREAAR

SEQ ID NO: 19129 - protein, 60 aa, Artificial Sequence
  Synthetic
DEVDEIVRRIEKLVTDDLKRVEDLVREVKKLVDEDKRKVDEIVKEIRRLVEEIRKEAERD

SEQ ID NO: 19130 - protein, 59 aa, Artificial Sequence
  Synthetic
EKVKRKLRKVVEEVERRSKKANEELEKKVREVEELSKRVLEKLKKVADEVRKEVKDAKD

SEQ ID NO: 19131 - protein, 60 aa, Artificial Sequence
  Synthetic
DSVERLVETIREIARESLRRAKELVKSNKKLAEDSKRRVDKLVKELKDLVTRVKETLKRK

SEQ ID NO: 19132 - protein, 58 aa, Artificial Sequence
  Synthetic
EVLELIEEVVREVKEVNTTVSKEVEDVVEETRKVNEDVAKLIEKVVREVKRVVDEVRT

SEQ ID NO: 19133 - protein, 60 aa, Artificial Sequence
  Synthetic
SELERLVEEIRRLVREIEERSKKTTEDIKRLAEDIRRRSKEAVDENEDLARKIRKRAEER

SEQ ID NO: 19134 - protein, 55 aa, Artificial Sequence
  Synthetic
REIDKVIEEVRKRLKEVTDSDREVIKEIEEVLREVEERNRRSIEKIRKVLEDVTK

SEQ ID NO: 19135 - protein, 60 aa, Artificial Sequence
  Synthetic
SEVDELVEKIRTTVKRVLEKHKRNTDETRRLVEEILERHTRTSRRIERVVREATDKLRRR

SEQ ID NO: 19136 - protein, 58 aa, Artificial Sequence
  Synthetic
EMLEKLREVLERAAEVLKRAEESDRTVDEEVERRVREVARSDDEVLKEVKREVERVKT

SEQ ID NO: 19137 - protein, 60 aa, Artificial Sequence
  Synthetic
SEAEEVAKRVKEIAKENADLAREVAKDIKRLADENKKHADDVARDIERLAKELLEAARRG

SEQ ID NO: 19138 - protein, 59 aa, Artificial Sequence
  Synthetic
ERAEKLARDAAEEAKKAAEESNKLIREAAERLKEAARRADKLVEEAARRLEKAAEEARR

SEQ ID NO: 19139 - protein, 60 aa, Artificial Sequence
  Synthetic
DEVDEVVRRDERLAEENLKRNTESSKRDRDLARENLKDAKRVVERIRKLMEDLKKLFDRG

SEQ ID NO: 19140 - protein, 59 aa, Artificial Sequence
  Synthetic
EKLTRRVEESLKRSEEVLRRVNESDKRSLEETRKVLEESNKEIEKVVRDLEELLKEVRR

SEQ ID NO: 19141 - protein, 60 aa, Artificial Sequence
  Synthetic
SEADKVVKEVDDIVARNTEENDKSSKRVEDIIRENDKHAEEVVRDIRRLAEELRELRERG

SEQ ID NO: 19142 - protein, 59 aa, Artificial Sequence
  Synthetic
EELEKRLRDVVRRAEERLRDVNRSDEEVVRRAEELLKRVDDRVKTVVEELKKTLDDERR

SEQ ID NO: 19143 - protein, 60 aa, Artificial Sequence
  Synthetic
EEVDRVVKRDDDLARKNLEENERSSREDDRLVKENEDHAKKVVDDIRKLMEELRELARRG

SEQ ID NO: 19144 - protein, 59 aa, Artificial Sequence
  Synthetic
EELEKRLRESLRRSREVLKRVNESDRDSLERTKKRLEDVDREVRKVVEELRKVIRDEEK

SEQ ID NO: 19145 - protein, 60 aa, Artificial Sequence
  Synthetic
SEAEEVARRVEKIAEDNARHAEKVAKDIEDLARENLELNERTSRRVERLARELLKAARRG

SEQ ID NO: 19146 - protein, 59 aa, Artificial Sequence
  Synthetic
EEARKLARKAAEDARRAAERANELVKRAADELRRAAEEANKSDEDAAREARRAAEEAER

SEQ ID NO: 19147 - protein, 60 aa, Artificial Sequence
  Synthetic
KDVEDVVREDEELAKTNKKHADDVVRRIKELIDRNRRLNEETSKRIEDLVRRLLELARRG

SEQ ID NO: 19148 - protein, 59 aa, Artificial Sequence
  Synthetic
ERVRKEVERSLRKSDEVLRRVNDKVRRVLEELRKVLEDVNRSDEKVLRELEELLERVRT

SEQ ID NO: 19149 - protein, 58 aa, Artificial Sequence
  Synthetic
SEDEKVRKVVEEAKEVNRRAEEAIKDVSERLERVNREVTKRSRDVSEEVRKMLERDAS

SEQ ID NO: 19150 - protein, 56 aa, Artificial Sequence
  Synthetic
VDEVVKRIKELVDRSLELAERIVERNERLVEKSERDVRKIVEDNKRLADEVAKRAT

SEQ ID NO: 19151 - protein, 58 aa, Artificial Sequence
  Synthetic
REDELVDKVLRELEELLRRVKKRLEDVSRDLERVNREVRDELRRVSKKVEDMARRDVG

SEQ ID NO: 19152 - protein, 56 aa, Artificial Sequence
  Synthetic
AETVVRDIRRLAEELLRTVDKIVKDNERLARESRERVRRIVERNEELARDLARKAR

SEQ ID NO: 19153 - protein, 58 aa, Artificial Sequence
  Synthetic
DDEKKVEDVVRKVKKVAEDVRRRLEKVSREVKKVLDEVRRRVEEVSREVEEILRRAAS

SEQ ID NO: 19154 - protein, 56 aa, Artificial Sequence
  Synthetic
ADEVVKRIEDLVRDLERRVDEIVKRNKELVKRVEEEADKIVEDNKRLAEEVLRKAT

SEQ ID NO: 19155 - protein, 57 aa, Artificial Sequence
  Synthetic
DSRRKVKEVIKELEEVLRRVKEEVEKVSRDLERLLKEVKEKLERVSRKVEEEIREKA

SEQ ID NO: 19156 - protein, 56 aa, Artificial Sequence
  Synthetic
ADTVVKRIKELMKDVERIVEEIVRENRKLVTDLLREVDRIVEENERLAEELAERAR

SEQ ID NO: 19157 - protein, 58 aa, Artificial Sequence
  Synthetic
SSKEKVERVVERLRRVNEEVIRLIEKVSRELEEVNKEVRERIERSVKETEDILRTAAS

SEQ ID NO: 19158 - protein, 56 aa, Artificial Sequence
  Synthetic
VDTVVREIEKLMDDSKKKADRIVDENRELVKRSEEAVEELVRRDKKLAEDVFRKAE

SEQ ID NO: 19159 - protein, 58 aa, Artificial Sequence
  Synthetic
DDERKVKKVVKEVRKVDEEVARRLDKVSKELRDVNREVKKKMEDSVKKTEDLAKKDAS

SEQ ID NO: 19160 - protein, 56 aa, Artificial Sequence
  Synthetic
ADTVVKRIKELAEESEKRVDKIVKRNKELVDKSKKDVDELVKRDEELMKDLVEKAR

SEQ ID NO: 19161 - protein, 58 aa, Artificial Sequence
  Synthetic
SAEEKVRKVLKELREVNERVERELKRVSDESERVDDEVNTRAKKVVRDVERVLEERAG

SEQ ID NO: 19162 - protein, 56 aa, Artificial Sequence
  Synthetic
VDEVVERIERLARESKKRVERIVRENEKSARESEKRADEIVKTIEELAERVARRAT

SEQ ID NO: 19163 - protein, 58 aa, Artificial Sequence
  Synthetic
KDEERVKEVVKKLRKVNEDVRRLIERVSRESKRLDEEVNRELDESAKDTERALRERLG

SEQ ID NO: 19164 - protein, 56 aa, Artificial Sequence
  Synthetic
ADEVVKEIEKLAKTSEELARRIVRENEESARESLERARKLVEDDRRLVKEVVERAE

SEQ ID NO: 19165 - protein, 60 aa, Artificial Sequence
  Synthetic
DLEERLATVVRKVEEDLKKLRRDNEKVIREVEKLNEDLNRRNKKLIDEVRKLLEKAKREG

SEQ ID NO: 19166 - protein, 59 aa, Artificial Sequence
  Synthetic
EKRVRELLEKIKRLLEEVDRRVKESIKEIEDSLRRSKEKADRSIEEIKKLLDDLRERAR

SEQ ID NO: 19167 - protein, 59 aa, Artificial Sequence
  Synthetic
SVEDLLRRVVEEVRKELERLKRKNEKVVKEVRKKNKEVNDRNEEVIRRVEKRLKKLKED

SEQ ID NO: 19168 - protein, 59 aa, Artificial Sequence
  Synthetic
EEEVRRLVRRIEKIVDEVRKRVDKSVEEIKRSLKRSKELADESLERIRRLLEEIDERVR

SEQ ID NO: 19169 - protein, 60 aa, Artificial Sequence
  Synthetic
SSDEELKKVLEDMKRVLEKVREDMKRVNDELKEAVERVKKESDDVDRELRRVIEEVVRED

SEQ ID NO: 19170 - protein, 56 aa, Artificial Sequence
  Synthetic
VKDLVRTVERLVEEIKDLVRKDVERVKKIVRRIEDLAKKDVEVSEKLVKEIKDRAK

SEQ ID NO: 19171 - protein, 60 aa, Artificial Sequence
  Synthetic
SAKELLDDVAKKLEEVVERVARKLDEVDERLREMIERVRKELEDVNRRLRDLVRRVVDKD

SEQ ID NO: 19172 - protein, 56 aa, Artificial Sequence
  Synthetic
VEEVVRDVERIVDEIEKRAEKVVRDSEKLVRDIEELVRRDVREVERIAEEIEKEAT

SEQ ID NO: 19173 - protein, 60 aa, Artificial Sequence
  Synthetic
SADEELERVLRELDKVIKDVVEESRDVDRKLERVVREVERLLDDVDRRLKEVIERVVREV

SEQ ID NO: 19174 - protein, 56 aa, Artificial Sequence
  Synthetic
VKDVVTEVKKLVETVKRLVEENVKRVEKIAEEIRRLVEKVVRESDELVERIERRVR

SEQ ID NO: 19175 - protein, 59 aa, Artificial Sequence
  Synthetic
SAEELIRKAAEDARRANKEAEDLIREAAKEARRANEEAERLIREAAKRAEDALRDADRK

SEQ ID NO: 19176 - protein, 59 aa, Artificial Sequence
  Synthetic
EEEAKKLADDIREAAKRSLDRARELAKRIREAARRSLEEAKKLAEEIKKAAEKALRDAT

SEQ ID NO: 19177 - protein, 60 aa, Artificial Sequence
  Synthetic
SAVERVVREVKKTVDESRKRAEKEKREVEDVVRRIREKVKRVVDDNRRVVETIKELSKER

SEQ ID NO: 19178 - protein, 59 aa, Artificial Sequence
  Synthetic
EEAREKLDRVRKELDDANRRVEEELRRVARELEKVLREVEELLRKVDEDIRRVLDEERR

SEQ ID NO: 19179 - protein, 60 aa, Artificial Sequence
  Synthetic
KDVEEVARKVKRVAERSEELVAELVKKNKKVVDESREKVDDVVRRNKELVDTIRDLARRR

SEQ ID NO: 19180 - protein, 59 aa, Artificial Sequence
  Synthetic
EEIRKLAEDVKRELERVNKKVKELSDRAAEELKRVNEEVRKKLEEVDREIRKVLEEVRK

SEQ ID NO: 19181 - protein, 60 aa, Artificial Sequence
  Synthetic
SLMEEVKKEVDKVVREIKELVRKVEEDVKKVVKESRDKVDKVVKENKKVVEKIRDLARRR

SEQ ID NO: 19182 - protein, 59 aa, Artificial Sequence
  Synthetic
DEIRKLIKEALDKLKEVLDEARDRLKKVKEELETVNREVEKLLRDVDREIEKVLKEVEK

SEQ ID NO: 19183 - protein, 60 aa, Artificial Sequence
  Synthetic
SEAEKIVREVERVVEESRRVAKENEKEVDKVVDTIRKLIEDLARRVEDILKKIEEERRKG

SEQ ID NO: 19184 - protein, 60 aa, Artificial Sequence
  Synthetic
VKRIEDLLREVEERLRRVSEEVKKRLKELHERVEEVLRELRKRLRDLERKARKVLEEAKK

SEQ ID NO: 19185 - protein, 57 aa, Artificial Sequence
  Synthetic
DVKEVLDEARKVVEDSIRRSKELIDEVRKRVEESVEESKRLAETVAEEVREVIERAR

SEQ ID NO: 19186 - protein, 56 aa, Artificial Sequence
  Synthetic
IETVLREVKRLVRENVKRIAELVKTIEDLVRENSERVRRVVREIRELVKELEKKAR

SEQ ID NO: 19187 - protein, 57 aa, Artificial Sequence
  Synthetic
DVDELLKRVEDEVRRSKEESEKLRKEVRKEVEDSAKTSKDLIDDARRTVEEVIKKVK

SEQ ID NO: 19188 - protein, 56 aa, Artificial Sequence
  Synthetic
VDTVVERIRKLVKENSDRVREVVDTIKKLVEENVREVRRLVEEIKRLVEEVKRREE

SEQ ID NO: 19189 - protein, 57 aa, Artificial Sequence
  Synthetic
DVKEVLKRAEEEVRRSIKRTREVLERVEKMVRDSSRTTTDLIRKVRREVKRVIDEVN

SEQ ID NO: 19190 - protein, 56 aa, Artificial Sequence
  Synthetic
IDTVLEDVKRLVKENSEKIDEVVREIRELVETNRKLVEDLVREIKELVEKALRDAK

SEQ ID NO: 19191 - protein, 57 aa, Artificial Sequence
  Synthetic
DVKEVLKRAKDEVRRSSDRTRRLIEKVRDESERVVEEVKKLNEDVNREVERVIREVK

SEQ ID NO: 19192 - protein, 56 aa, Artificial Sequence
  Synthetic
IDTVLREVEKLVRDNERLVEKLVKEVEDSVRETKKRVEESVDTVRRIVEELKRRAT

SEQ ID NO: 19193 - protein, 60 aa, Artificial Sequence
  Synthetic
SEAEEVLREVKEVVDRSRELAERVLRAVRELVKRDEDLARKILEDVARVVKTIDDLARER

SEQ ID NO: 19194 - protein, 56 aa, Artificial Sequence
  Synthetic
KEVVDRADRALREVNKRLDEVVREVEKLLRESLDRSRRVIEEVAKRLEEVLKKLED

SEQ ID NO: 19195 - protein, 60 aa, Artificial Sequence
  Synthetic
DEMDEVRREVERVVREDEKLARDLKRRVEKVVEDIKRSADEVLKEVKKLVEEIRELMKKR

SEQ ID NO: 19196 - protein, 56 aa, Artificial Sequence
  Synthetic
REVVRRVEEELERSLRKSREVVKRVEKELEDVLREHRKVLEEVTDLLRRVLEELRR

SEQ ID NO: 19197 - protein, 60 aa, Artificial Sequence
  Synthetic
REAEEILKKVAEVVKEDKKLADDLRKKNKETVDDIRRKAEELLKRVKKVVEELKRRMEEG

SEQ ID NO: 19198 - protein, 59 aa, Artificial Sequence
  Synthetic
DELRKIAEEVRKRLEDSVRTTRDIIRRVKRENEEVIKELERVMRKVREDLKRVKEEIER

SEQ ID NO: 19199 - protein, 59 aa, Artificial Sequence
  Synthetic
SREEVAKEVRELIARSEKETRDIIREVEDRMRRSKEETEEVIKEVKRLLEEVKKRLEEK

SEQ ID NO: 19200 - protein, 56 aa, Artificial Sequence
  Synthetic
AEEILRTVKKVVDRDRELAKRLLDEARELVRTNRELVKRVLETVTRLVKKIDDEAR

SEQ ID NO: 19201 - protein, 60 aa, Artificial Sequence
  Synthetic
DEEEVEKRVKDLLRESTERTKEVNERVRRLAEESRKRTEEIIREVRRLAEEVEERLRRRG

SEQ ID NO: 19202 - protein, 56 aa, Artificial Sequence
  Synthetic
VRELLETVKKLVKDDVDIVRRNLEEVKKLVETNVRLAEEVLKEVDRLVKKVEEDAR

SEQ ID NO: 19203 - protein, 57 aa, Artificial Sequence
  Synthetic
DELDEIRKRVEELIKRSEEDSREVRRRLEEIIERNRKISRDVEREIEKLIKDVRDSN

SEQ ID NO: 19204 - protein, 62 aa, Artificial Sequence
  Synthetic
GEELRRVEEVVKRVRELVERSKEETDKIAEDVRRLLKESNDDTERIKRKVEEMLKELEERIK

SEQ ID NO: 19205 - protein, 57 aa, Artificial Sequence
  Synthetic
RELDEVVKTVRKLVDESKKESDDVAREARELLEKLERESEEVVRRVRELVKELKKKR

SEQ ID NO: 19206 - protein, 56 aa, Artificial Sequence
  Synthetic
VDEVLRKAKELIDDSRRLIEDVKRRLKELIDRDRRLIERVLEEAERLIRELDEEAR

SEQ ID NO: 19207 - protein, 60 aa, Artificial Sequence
  Synthetic
KEIEELDKMVEDIVRELDELVRAHTETVDRLIRDLERSNEELRKLIKKIVDELEDLVRRG

SEQ ID NO: 19208 - protein, 62 aa, Artificial Sequence
  Synthetic
EEVVRRLKDVERKVKKLAEDVKEKLRRSVERVTKLLKEVEDNSREVEKEAEERVDRVLKKVK

SEQ ID NO: 19209 - protein, 56 aa, Artificial Sequence
  Synthetic
REVEELVERIERSSRRALERLEDLDRTIKKSSEDARRRLKEMDDRLEELVKRARDN

SEQ ID NO: 19210 - protein, 56 aa, Artificial Sequence
  Synthetic
EEEIKKVLEEDRKLVEKLERDNKRVLDEDKELVRRNEERNREVLERIRELIERART

SEQ ID NO: 19211 - protein, 56 aa, Artificial Sequence
  Synthetic
DEVEKLIKDIRDIIRRVEEAVARLVEENNKLVKEVDDRLRELSKENRDIVRKVREG

SEQ ID NO: 19212 - protein, 60 aa, Artificial Sequence
  Synthetic
KRTLLEEAKRVLEDIEKEARDLLRRLEEIIRRTRKLVKDILDRSRDILRRTRELVDRVRR

SEQ ID NO: 19213 - protein, 57 aa, Artificial Sequence
  Synthetic
KEAEDLLRRIEDLIRKVKKEVEDLVRENNRLVEKVVRELEKLSDELRKLIKRIKDAG

SEQ ID NO: 19214 - protein, 60 aa, Artificial Sequence
  Synthetic
KETLLRDIERIRREIEKLIEELLRRAEEIIRDTERLVEKILRESKELLKEIRELAEREKQ

SEQ ID NO: 19215 - protein, 59 aa, Artificial Sequence
  Synthetic
DLERVVEESSRLVERVVRRNKKVVEDIRRRVREVERKNEEVTKEIKKILDEVRRRLERD

SEQ ID NO: 19216 - protein, 59 aa, Artificial Sequence
  Synthetic
REELKKLLERSREMLEKSERTVDTSREEAKRVLEESEELVERTLREVEEIIRRVIERVR

SEQ ID NO: 19217 - protein, 60 aa, Artificial Sequence
  Synthetic
SLEEVLRAVRKLAEDVKRKNKEVLDRIRDSSRRSEEKLEDSLRKIEELVRKLEEELKRDG

SEQ ID NO: 19218 - protein, 59 aa, Artificial Sequence
  Synthetic
DEDLKRLLEEIKRVLEESEEKVERSLREMEEVDKETEKRSRKLNREVREVVKDVADKVR

SEQ ID NO: 19219 - protein, 60 aa, Artificial Sequence
  Synthetic
SRLEDLLRKVKKVLDEIRRTIEKSLEDVRELIKRIERTIEKLLERSRDVVRRVLEDAERR

SEQ ID NO: 19220 - protein, 59 aa, Artificial Sequence
  Synthetic
EKAKEVLKEVKDRVDEVAKELTDVNRDIRRIVDELRRRAEKVVRESRELSRELREELEK

SEQ ID NO: 19221 - protein, 60 aa, Artificial Sequence
  Synthetic
SELERLLEEVEKELRKIERTITELLRRSRELLEEIERAIKESLRDSERLLREIEDTVRKR

SEQ ID NO: 19222 - protein, 59 aa, Artificial Sequence
  Synthetic
SKVREVLREVRERVKEVVERLKRVVEESRKRSEEVKKKLEEVNRRSEEESKRVKEELKK

SEQ ID NO: 19223 - protein, 60 aa, Artificial Sequence
  Synthetic
KLEEVLRTVRKLVEDLREELERVVRTSRELTRRLEEELKEVVKRSEDLSRRLEEILKRDA

SEQ ID NO: 19224 - protein, 55 aa, Artificial Sequence
  Synthetic
TEALKEVKRLVDEIRKTIEEALRDSKRLVDEIRETIKRSLEEVEKEVRKAEERIR

SEQ ID NO: 19225 - protein, 59 aa, Artificial Sequence
  Synthetic
SIEDVLRAVEKLLRDLKRRSEEVVKHSETELRRLLEEVRRVLEHSREALERLEERIKDV

SEQ ID NO: 19226 - protein, 59 aa, Artificial Sequence
  Synthetic
DEVIKEILERVKKLIEEIDERNKELNERTKELIKRIKDRLKELNDKTEKAIDKIRKEVE

SEQ ID NO: 19227 - protein, 59 aa, Artificial Sequence
  Synthetic
SIEEVLREVEELLKELEKRARDVLRHSEELLRDVIRRSEEVVKHSEDLLRKLKEAAKDV

SEQ ID NO: 19228 - protein, 59 aa, Artificial Sequence
  Synthetic
DEELKKILDEVRKVIKELEDKLRKLNKKTEDVIRELIERNDRLNKDTKRVIDELKEKVR

SEQ ID NO: 19229 - protein, 59 aa, Artificial Sequence
  Synthetic
SIEEVVEEVKELLERLIRRSEDVLRHSKKLLEELERKSERVVEHSEDLLRKLEEKIKDV

SEQ ID NO: 19230 - protein, 59 aa, Artificial Sequence
  Synthetic
DETLKRILEEVREVIKKLIKSSEDVNRETEELIRRLEDRNRKLNEKTEKVIREIEEEVK

SEQ ID NO: 19231 - protein, 59 aa, Artificial Sequence
  Synthetic
TVEDVLRELRERLKESEKRDRDSVRKAEELLRRSEKRTDDVVKHSERLLEELEEAVRRI

SEQ ID NO: 19232 - protein, 59 aa, Artificial Sequence
  Synthetic
EDVVRRLLEEVEELLRRNVKKSEELLKEIRERLEDNIRKVEKVNRDNKREIEEILRRVK

SEQ ID NO: 19233 - protein, 59 aa, Artificial Sequence
  Synthetic
TVEEVLKEAEDLLKESKERSEDSARRAEEILRRSEERTRKVVEHSREMARRLMEKVKEK

SEQ ID NO: 19234 - protein, 59 aa, Artificial Sequence
  Synthetic
EKVVEDVLREVEKLVRDNIEHSKRLLDEIRRRVEENIRRVDEVNKRNEELIREVEERVR

SEQ ID NO: 19235 - protein, 60 aa, Artificial Sequence
  Synthetic
SKVEEILERVKRLIEENIKRSEEILEEVRRLIRENTEVSKKLLEEVKREITELEKEVRED

SEQ ID NO: 19236 - protein, 59 aa, Artificial Sequence
  Synthetic
ERVKDVLRRLKKIVDESKRRSDKVNKEIEDRVRESEKKSRKVNEDIKRLVKRVADEVER

SEQ ID NO: 19237 - protein, 60 aa, Artificial Sequence
  Synthetic
SDIEDLLKKVEDLIRRNIETSRRLLEEVRKLIEENIRLAERILEEVRRLIEELARLTRED

SEQ ID NO: 19238 - protein, 59 aa, Artificial Sequence
  Synthetic
EKVKDALRRLRDLIRRSKEDSERVNEEIKDIVRKSRETSEDVVRRARELLDKVRREVEK

SEQ ID NO: 19239 - protein, 60 aa, Artificial Sequence
  Synthetic
SELEELLKEVAKLIKRNKDRVRKILDEVRKLIKRNEDVSRRLLEDVERLIKELEREVRED

SEQ ID NO: 19240 - protein, 59 aa, Artificial Sequence
  Synthetic
KKVEDILRTLEELIRESERTSEEVLRELREEAEESKRKSKRVNDRIRELVEKVDREVDK

SEQ ID NO: 19241 - protein, 60 aa, Artificial Sequence
  Synthetic
SKLERLLEEVEKLIRRNKRIVREILREVRELIERNIRVSEEINRRNRRLIEEIRRLVEED

SEQ ID NO: 19242 - protein, 59 aa, Artificial Sequence
  Synthetic
ERVKRILKEIERLVEESKRESERVLEEIKELVKDSKRRSKEVNDHSKKLVDEVREAVKK

SEQ ID NO: 19243 - protein, 59 aa, Artificial Sequence
  Synthetic
SRIDELLKEIRKVTEKTRRDVERLLEEIRKVTDKSRKDSERSLDEARKVLDTIRKLLED

SEQ ID NO: 19244 - protein, 55 aa, Artificial Sequence
  Synthetic
EALERIKRSSEELAEEVKRVLDEVRRSSEELEKRARDSLRELRELVKRVEEEARK

SEQ ID NO: 19245 - protein, 59 aa, Artificial Sequence
  Synthetic
SRIEKLLDEIRKVSKKSIDEVRKILEEVEKVTRDSIRKLRKLLREIEKVLEEIERLLKN

SEQ ID NO: 19246 - protein, 55 aa, Artificial Sequence
  Synthetic
EALKRIKELSDEVREEVKKVLRKIEESSERLEEEAKKVLDTVRELVERVARRAKE

SEQ ID NO: 19247 - protein, 60 aa, Artificial Sequence
  Synthetic
REAEEALRRVEEVVRRSKTELKKLLEDVRRLIEESERELRDLLRRVEEVIRRIREELRER

SEQ ID NO: 19248 - protein, 56 aa, Artificial Sequence
  Synthetic
KEMLRTVDELLKDSERDSERVLREIEELLERSKRKSEEVLREIERLLEKIEREVRK

SEQ ID NO: 19249 - protein, 57 aa, Artificial Sequence
  Synthetic
SEVEEVAREVDELVKESRDESRRIVEEAKRLLKESNKSVKDIERDARRLVKEVEDAV

SEQ ID NO: 19250 - protein, 56 aa, Artificial Sequence
  Synthetic
VKKVLDEVRELAERSKDLNRRLLERIRELVRRSKERNKELLKRLRDLVERVKREIK

SEQ ID NO: 19251 - protein, 57 aa, Artificial Sequence
  Synthetic
DEVEEVKKDAERLNKELHESLRRSNEEAKRLLKESKDASREVVKDARRLTKELRETM

SEQ ID NO: 19252 - protein, 56 aa, Artificial Sequence
  Synthetic
VEKVLRDLRRLTEETKRRNRETLEEIRRLIERSKEEIKRLLEELRELTKRTKDRIR

SEQ ID NO: 19253 - protein, 57 aa, Artificial Sequence
  Synthetic
DEVKEVKDRARKLVEEVKRAVDEVRKRADELNKEVHESLRRSNREAERLVKEVEDTV

SEQ ID NO: 19254 - protein, 56 aa, Artificial Sequence
  Synthetic
VETVLREITELAKKILRDIEELLREITKITEESKRENEKSLRELEDLARRVKEKTR

SEQ ID NO: 19255 - protein, 57 aa, Artificial Sequence
  Synthetic
DEVERLVEELERLLREVRDSVRRSNTEAKELNKEVHEAIRRVVEEARRLLEEVRRTA

SEQ ID NO: 19256 - protein, 56 aa, Artificial Sequence
  Synthetic
VETVLRRVEEVARRVKKLNEDTLRTLRRITEDSLRKIEKLLRDIEKLVREVVERLR

SEQ ID NO: 19257 - protein, 60 aa, Artificial Sequence
  Synthetic
SEIEDLERRIKEVVDDLRRLVEENSKKIDDLLRRLKDLIRKVEEMNRKLIREAEELVREE

SEQ ID NO: 19258 - protein, 58 aa, Artificial Sequence
  Synthetic
EELRKVEESVRRLAEEIKKELEDSRRRVEELVREIEKELEDVNRDARRLVDKVREELR

SEQ ID NO: 19259 - protein, 57 aa, Artificial Sequence
  Synthetic
REVEELKKTLDRLVEESKRESDKVREDAERTVRESEDKSRRVKDEARRSLEEVEEDV

SEQ ID NO: 19260 - protein, 59 aa, Artificial Sequence
  Synthetic
KDEIKKILEEAEEVVRDSKKKIEDLLRHNKKRVDDSLRKIEEILKHNRDEIERVREEIR

SEQ ID NO: 19261 - protein, 57 aa, Artificial Sequence
  Synthetic
DEVETVREEAKRLVEESRKESRRVEEELKKLLRRVEEEARKVKEELEKSVDEVRKAV

SEQ ID NO: 19262 - protein, 59 aa, Artificial Sequence
  Synthetic
REEIKKILERVREVVKRSKDEIREILKEVRKMIDKVRKEIKEILDHNKEVVRKIKEETK

SEQ ID NO: 19263 - protein, 57 aa, Artificial Sequence
  Synthetic
SEVEEVKERAERLVRESEELSDRVRREAEKTIEAVRELVERIRKRLKESVEEVERRV

SEQ ID NO: 19264 - protein, 59 aa, Artificial Sequence
  Synthetic
REEIKKLLEEVKRVVDKSKRDIDELLKHNRRKIDEVLRELEEILRHNETRIKEVLDRAR

SEQ ID NO: 19265 - protein, 60 aa, Artificial Sequence
  Synthetic
SEVEKLLREAEEDVERILKRLEDSMDSNRELVERILETLKRSLDEVEKEIRKIIEELKRR

SEQ ID NO: 19266 - protein, 55 aa, Artificial Sequence
  Synthetic
DKVIKRLEDLLRKVEKVVRDTNRTIKDSIRRVKEVVDTTNREAEKLLRRVEDTVR

SEQ ID NO: 19267 - protein, 60 aa, Artificial Sequence
  Synthetic
SRVEKLLDEVRRLAEDILRDLERSMRSNEELVRKILEKLKESLESNRRLVKRILERLREE

SEQ ID NO: 19268 - protein, 55 aa, Artificial Sequence
  Synthetic
EKVIREVERLIEEVKRVVDDTNRRAEESIKEVRDLVRRTNEEIEKTIEEVDREVK

SEQ ID NO: 19269 - protein, 57 aa, Artificial Sequence
  Synthetic
REAEEIKKALDKLAEELRELLERSRDTVRKLIKELRDLVRESRRRVKELIDDIRRRV

SEQ ID NO: 19270 - protein, 59 aa, Artificial Sequence
  Synthetic
REELKRLLEEVERLIERLKERIKRLTEESEKLVRELLKLIEKSTKESEEDVKRLVDEAK

SEQ ID NO: 19271 - protein, 58 aa, Artificial Sequence
  Synthetic
SEIEDLLRRVRRLIEESEEVIKRVADEVKEIIDRSREKIKRVTEESREIIKRLKKDGK

SEQ ID NO: 19272 - protein, 58 aa, Artificial Sequence
  Synthetic
RRVEDVERDIRRLVRKLREDNKRIAKTIEDLVRELRELNKRSEDETRKLVKELRDAAK

SEQ ID NO: 19273 - protein, 61 aa, Artificial Sequence
  Synthetic
SEVERIKKAVEDLVRKLRKVSKETLDESRELVKELKERDKESEKDSRRLAERLRKLLEEKN

SEQ ID NO: 19274 - protein, 59 aa, Artificial Sequence
  Synthetic
RKVVKDILDEVKKLIDDIEEHSKRVADRNRRLIEKIKKDTEDVIKRNRDLVTEIEKRIR

SEQ ID NO: 19275 - protein, 61 aa, Artificial Sequence
  Synthetic
SEVEKIEERVKRLVEELKKSLKESEEETERLARELRDVDRRSKEESRRLAEELEDLLRRRN

SEQ ID NO: 19276 - protein, 59 aa, Artificial Sequence
  Synthetic
DKVVEELLKEIEEEIRKILETNDKVVKENRRLAREILEDTKRVVDRNRELIKRIAERIK

SEQ ID NO: 19277 - protein, 61 aa, Artificial Sequence
  Synthetic
DEVETIAKEVKELADKLRREVEESRKDSEDLVRKLRESLKESRKRSKDLVDELRKLLERKN

SEQ ID NO: 19278 - protein, 59 aa, Artificial Sequence
  Synthetic
KKVVDDLRKRVEKLIKEIEEDIERVIRRSRKLIEDILRDNERVVKENEDLIREIEERIR

SEQ ID NO: 19279 - protein, 61 aa, Artificial Sequence
  Synthetic
SDVERVEEELRKLLKEIEDSVRESERRLEKLLEDLKRSTEKTKKELKELIDRLEERVRERG

SEQ ID NO: 19280 - protein, 59 aa, Artificial Sequence
  Synthetic
SERVKEILERVRKLVEDVLRRNKRLVEEVERLIEEILRVDERIVREVRELIKRIEERIE

SEQ ID NO: 19281 - protein, 61 aa, Artificial Sequence
  Synthetic
SSVEEVKKTLEDLLRESDKSVRESERRLRELLRESDESVERSRKTLEDLIRELEDLVRKRG

SEQ ID NO: 19282 - protein, 59 aa, Artificial Sequence
  Synthetic
DREVEKILREVTKLIEESLRRDREITEEVRDLIKKSKEKDKEIVDTVRRLIREIKERIR

SEQ ID NO: 19283 - protein, 61 aa, Artificial Sequence
  Synthetic
RSVEEVVKTLEDLLEKLERSVRESEERLKKLLAESDDSVRKSAEELRRLIEELKDLVRREA

SEQ ID NO: 19284 - protein, 59 aa, Artificial Sequence
  Synthetic
EREVKRLLDEVERLIDEIRERDKDIVREVDKLIKDSKREDKRIVDDVRRLIEEIKRRIK

SEQ ID NO: 19285 - protein, 61 aa, Artificial Sequence
  Synthetic
SSVEEVKRELEKLLEDSDRSVEESKKTLRRLLEESNKELRRVAERLKDLIRELKKRVKERG

SEQ ID NO: 19286 - protein, 59 aa, Artificial Sequence
  Synthetic
DREVEEILRRVRKLIEESKTMDKKIVDDVRKLIEESLRDIERIVEDVERLIKEIKERIT

SEQ ID NO: 19287 - protein, 61 aa, Artificial Sequence
  Synthetic
SSVETVEKELRRLIKELRDSVKKSEDDLRRLLEESNRLVREVERRLRELLEKLRKLVEERA

SEQ ID NO: 19288 - protein, 59 aa, Artificial Sequence
  Synthetic
DREVKRILDEVKDRIRRILREDEEIVKEVRRRIKRSEEAIREIAREVDREIEDIERRIR

SEQ ID NO: 19289 - protein, 58 aa, Artificial Sequence
  Synthetic
SEVEELEERARKLLEDVERLTREVEERAKELVKRVKDSSKRSEDEIRRLLRKLLETSG

SEQ ID NO: 19290 - protein, 56 aa, Artificial Sequence
  Synthetic
VEKVIRTLEEEVRRDEEKIREVLERVEDLIREDLRRDEELVKELEKLIREVDEKER

SEQ ID NO: 19291 - protein, 58 aa, Artificial Sequence
  Synthetic
KEVEDLEEELKKLLKEVKTRTEKVVRDAEKSVRDLEKSSRDSDRTLKDLLRRLMETTG

SEQ ID NO: 19292 - protein, 56 aa, Artificial Sequence
  Synthetic
VKKVLDEVRRLVEEDKKRIEEVLKENRESVKRDKELDDRLLERVRELIERALERAR

SEQ ID NO: 19293 - protein, 58 aa, Artificial Sequence
  Synthetic
SEVERLEEEAKRLLEELKRLVERVVREAERSVEKVRDSVRRSEEEARRLLEEITKDDG

SEQ ID NO: 19294 - protein, 56 aa, Artificial Sequence
  Synthetic
VDKVVEDLKDDIRKVKKRIEEVLDENRKSVRKLDEDDRRLVDELRRLVKEVKDKVR

SEQ ID NO: 19295 - protein, 56 aa, Artificial Sequence
  Synthetic
KEVEDLKEELKKLVEELERLVEKNVREARELVKRSEEESRRVAETARRLVDEIRRA

SEQ ID NO: 19296 - protein, 59 aa, Artificial Sequence
  Synthetic
RRTITELLKEVEELVKRVLDAIRKSNREVEKLVRESLRRIEKLLREVEKLVKELLERRK

SEQ ID NO: 19297 - protein, 56 aa, Artificial Sequence
  Synthetic
DEVERLEEELKRLVKEIEDSVRESKKEAEETLRESRKLSREVEERARRLVEELKRK

SEQ ID NO: 19298 - protein, 59 aa, Artificial Sequence
  Synthetic
EREIRELLEEVRKVVEEIKRRDDELVKENRRSIEESKRRIEELLKEVKELVERVTDTER

SEQ ID NO: 19299 - protein, 56 aa, Artificial Sequence
  Synthetic
RDVEEVKKEAEELVKKSEESVRRSKEELERTLKRSREESERVKETAKKLVEKIERD

SEQ ID NO: 19300 - protein, 59 aa, Artificial Sequence
  Synthetic
KETIKRLLDEVRKLVEDSLRHDEELVERNKKSIKDSLDEIERLLREIEELVRKVEEDER

SEQ ID NO: 19301 - protein, 56 aa, Artificial Sequence
  Synthetic
SDVDRVKEDAKRLVEESKRSVDESAKDMRRTLKRSRDESRRVKEELKRLVDRVKES

SEQ ID NO: 19302 - protein, 59 aa, Artificial Sequence
  Synthetic
KDEIRELLERVKKLVDESRRHDKRLVEENRRSARDSLREIERLLREVRKLVEKVLRDRK

SEQ ID NO: 19303 - protein, 60 aa, Artificial Sequence
  Synthetic
DEVETALEEVKELLERVLRKIEDDLRRVRDLLEKLKRTNEELLRKVREEVRRLADLIRKR

SEQ ID NO: 19304 - protein, 55 aa, Artificial Sequence
  Synthetic
ETVKREIEKARETLERLLKRSEEEVDRVKKEVEEISRRVKKEVKKLVDEIRERLR

SEQ ID NO: 19305 - protein, 60 aa, Artificial Sequence
  Synthetic
RRVEEVAKELKRIAEKLKRDIEELLRDDKRLADELRETNKELLRKDKEILDRLAEEIKRR

SEQ ID NO: 19306 - protein, 55 aa, Artificial Sequence
  Synthetic
ETVDRKIDELAERIRRLLEKVKRHVEETKRDVRRVSEEVRKHVEETKRDVRRRLK

SEQ ID NO: 19307 - protein, 60 aa, Artificial Sequence
  Synthetic
SRVEDLVRRIRELVRRDLKRIKDLEEEIKRLAEEIERHSKKVVDELKELADRLRKMLEEG

SEQ ID NO: 19308 - protein, 59 aa, Artificial Sequence
  Synthetic
KEKVDDIRREVKRVVRESEEANKRVRKLVEDIVKRAEDSNRRVEELVRELVEDLKRAAK

SEQ ID NO: 19309 - protein, 60 aa, Artificial Sequence
  Synthetic
SEVDELLKTIEKLARDDVKKIREVVEENKREVRRLEEHSKEVVKEIKDRIKEVLELLRRG

SEQ ID NO: 19310 - protein, 59 aa, Artificial Sequence
  Synthetic
ERVLERVERLVRRLAEESRRANEKSKEDTKRLEDRLKKSNDDLEKLVRDVVTRVREEAD

SEQ ID NO: 19311 - protein, 60 aa, Artificial Sequence
  Synthetic
DEVKELEKRIRKLVREIEEHSKEVVKENRRLVEEDLETIKEVLREIKRRIKKLLELLERG

SEQ ID NO: 19312 - protein, 59 aa, Artificial Sequence
  Synthetic
KDVLKTIKDTVEELVERLKRSNERSREETKKLVKRSREANKRVEDLVRKVVKELREAEK

SEQ ID NO: 19313 - protein, 60 aa, Artificial Sequence
  Synthetic
EEVERIVKEIRDLAEKDKEHSKRVEEEIRRLVEEVERHSRRVEEEIRRLAEELKRLLDRG

SEQ ID NO: 19314 - protein, 59 aa, Artificial Sequence
  Synthetic
EEKLEDLERKVRKLADESREVNDRLRELVERVVRRLEEVNERLERLVEELRRRLEEAKR

SEQ ID NO: 19315 - protein, 60 aa, Artificial Sequence
  Synthetic
DEVEELVERIKRLVERDEREIKRVEDEIERLVRRVDEHSKRVEEEIRRLVTELMELLDRG

SEQ ID NO: 19316 - protein, 59 aa, Artificial Sequence
  Synthetic
ERVVEKVRRLVDKLAERSRDLLRKLRDLVRRVVKRLEDVNRRLEELVRKLAEELKEKSR

SEQ ID NO: 19317 - protein, 60 aa, Artificial Sequence
  Synthetic
SEIEKILDDIRREAEKDLRLSEKIVEDIKRLAERDIKRLREIVEEIEKLLREVSDELRKR

SEQ ID NO: 19318 - protein, 62 aa, Artificial Sequence
  Synthetic
EDAERLIREVEKLVRDLVRESEKSNEEVRKLVEDLVRESDKVLKDVKRLVDEVVRRAREEVK

SEQ ID NO: 19319 - protein, 60 aa, Artificial Sequence
  Synthetic
SRIDEIVKRIEELARRDEEVSREIVKEIRDLAKRDEDTSKRIVEEIKELVKKIKEELERS

SEQ ID NO: 19320 - protein, 62 aa, Artificial Sequence
  Synthetic
EDAKRLLDKVRKTVEDLVRRSRKSNEDVRREVEKLVDRSRKSNTTVERLVRKVVRELRETVR

SEQ ID NO: 19321 - protein, 60 aa, Artificial Sequence
  Synthetic
SRAEEIVERIKKLAEDDKRESDRIVEEIKKLARDIEEAIRRIVKEIRDLVKEVRDVLERE

SEQ ID NO: 19322 - protein, 62 aa, Artificial Sequence
  Synthetic
ERAKELVEEVERLVRELVKDSDRSNKEVRRTVKEIVERAEKLVRDVEEDVERLVRDLKRKVK

SEQ ID NO: 19323 - protein, 60 aa, Artificial Sequence
  Synthetic
SEIEKILKEIEDLARRDEEVSKKIVEDIRRLAKEVEDTSRDIVRKIEELAKRVLDRLRKD

SEQ ID NO: 19324 - protein, 62 aa, Artificial Sequence
  Synthetic
EDAERLVREVEDLVRRLVRRSEKSNEEVKRTVEELVRRMEESNDRVRDLVRRLVEELKRAVD

SEQ ID NO: 19325 - protein, 60 aa, Artificial Sequence
  Synthetic
SEIEKLRKTVERIKEEVKRLSDEHKKRTRELERTSERLVEEHRERTEELRRRIEEIVRKK

SEQ ID NO: 19326 - protein, 56 aa, Artificial Sequence
  Synthetic
IDTLVEEIKELMKEDSERIKKSVKEVDDLAKEDSDRIRDSVRTVKELADEAIRRAK

SEQ ID NO: 19327 - protein, 60 aa, Artificial Sequence
  Synthetic
SEIERLEDRIRRLIRDSRELVKTLKKELKEIIERLEELSERLRREIERVVREVEDVVRKR

SEQ ID NO: 19328 - protein, 56 aa, Artificial Sequence
  Synthetic
IDELLKKLDEIATRDREKIERLREEIRKIARKDEEDIRKLVKEIRDEVRKLKEDAR

SEQ ID NO: 19329 - protein, 55 aa, Artificial Sequence
  Synthetic
SEVEELRELVKRLIERIKRVVETNERDLEELIKRVKDAVKKNKEDLERLIEEIDR

SEQ ID NO: 19330 - protein, 55 aa, Artificial Sequence
  Synthetic
KELLDELKRLIDEVEKKLRESNERVRRLAEEVLRRSKESNDRVRDEARKVKETAR

SEQ ID NO: 19331 - protein, 55 aa, Artificial Sequence
  Synthetic
DEVEALKRTVEELIKRIRKAVEDNERDLERLLKESRDVVKKNEEDLKRLIEEIER

SEQ ID NO: 19332 - protein, 56 aa, Artificial Sequence
  Synthetic
IEKLLRELERVIEEIVRRLEDSNRRVRDIARRDKERSKRSNDRVRRLAEEVKERAK

SEQ ID NO: 19333 - protein, 56 aa, Artificial Sequence
  Synthetic
SEVEELKKLVEELRREIRRLVRENEEDLKKLLEESKRMVERLKELVKKLIEDIRRT

SEQ ID NO: 19334 - protein, 55 aa, Artificial Sequence
  Synthetic
KELVDELKRVADEIVRRIRESNRKVRKIAEEDKTRIKRLLEELERLIADVERRAT

SEQ ID NO: 19335 - protein, 60 aa, Artificial Sequence
  Synthetic
SEVERLLRELERSVTEVKERVRRLVEELERIVREVKKRVDEHKERNKRALEDVKRKVRDR

SEQ ID NO: 19336 - protein, 55 aa, Artificial Sequence
  Synthetic
EEVEKRARKTTEDIKRMADKVTKVAEEVLRRVEKVVEEVREVSRRVVEDIERDTR

SEQ ID NO: 19337 - protein, 56 aa, Artificial Sequence
  Synthetic
KDVEKVIEDIERILTEVRRHSKEILDRIKRILETIREIVKEVKKRNEDLLREARES

SEQ ID NO: 19338 - protein, 58 aa, Artificial Sequence
  Synthetic
KSVEDARRAVERVVREARRSNEEVKRAVEEVAKELERLVKESEDESRRIVEELKKTVD

SEQ ID NO: 19339 - protein, 57 aa, Artificial Sequence
  Synthetic
DEVEEVIKRIRDILRRVEEHSEKILREIEKLLRDATRHSEEVKRRNEKILRDAENSR

SEQ ID NO: 19340 - protein, 58 aa, Artificial Sequence
  Synthetic
EDVKRVRDEVKKVVERVRRSNKKVEDMVREVERRLRESNKESREDSKRIVEEMDRRVK

SEQ ID NO: 19341 - protein, 59 aa, Artificial Sequence
  Synthetic
SEVEKIIDELRKVAEEHKRRVKELVDTNRKVLKEVKDRVRDLVRRVREILKDVSDKARR

SEQ ID NO: 19342 - protein, 54 aa, Artificial Sequence
  Synthetic
EIKEVLKESEEEVRRMLEELEKELRRSRKTVEELLRRLDKTLREVEEAVKRERD

SEQ ID NO: 19343 - protein, 60 aa, Artificial Sequence
  Synthetic
DRVEELLKRVREILERVEREARRLVEEVEDVMRRHKEKLEELVRHNREVLREVSREARRT

SEQ ID NO: 19344 - protein, 55 aa, Artificial Sequence
  Synthetic
EEVKKVLKEVEDTVRELVRRLEKKLKESIDTVERLLEELERVLRESNKTVEDETR

SEQ ID NO: 19345 - protein, 59 aa, Artificial Sequence
  Synthetic
DEVRKILRELREALKRHVEEVKRLLEHNERVLKKVKEDVERLMEEVKRALEDVKRDVDR

SEQ ID NO: 19346 - protein, 55 aa, Artificial Sequence
  Synthetic
KEVRKVLRESEKLIDDLLRELKRVLEETNRRVEDLLRRLEEVLRRVEKTVRDRAK

SEQ ID NO: 19347 - protein, 57 aa, Artificial Sequence
  Synthetic
SLKERLEKVVEESLRRVEEVIKKLERRVEESERRVEELVKTLRDVLRKILRELEKEG

SEQ ID NO: 19348 - protein, 59 aa, Artificial Sequence
  Synthetic
RETVERLLEEIRELLERSRKNVEDLERRIDKLLEDSERNARELLERIRKELRDISEKRK

SEQ ID NO: 19349 - protein, 57 aa, Artificial Sequence
  Synthetic
SMKEEIDRVVREVAENVRDMIRRLKRVLEESLRRVDELVKEIKKVLDDVRRRIEEDG

SEQ ID NO: 19350 - protein, 59 aa, Artificial Sequence
  Synthetic
EETVKRLVEKIRELNERSLDNVKKLLDRIRELLEESERNVKDIVRRIRDLLRRIKEKAT

SEQ ID NO: 19351 - protein, 60 aa, Artificial Sequence
  Synthetic
DEVERVLEEIERMLREVEEHTRRVVEEVRRVLEEVKRHSERVVREIRRLLEELRKLVERG

SEQ ID NO: 19352 - protein, 59 aa, Artificial Sequence
  Synthetic
KDLVRKVEEEVRRVKRELERLNKELEDEVRRIEEAAKRSNEELKKVVDEVKRELEKASK

SEQ ID NO: 19353 - protein, 60 aa, Artificial Sequence
  Synthetic
DEVDEVLKEIRKVLEDVRKHSEEVLREIERVVREVKKHSRKVVEEIKEVVKRLEDLARRG

SEQ ID NO: 19354 - protein, 59 aa, Artificial Sequence
  Synthetic
KRLVDKVRKVVEEVERELKKSVDDVRRVVEEVERRLREVNKEVEDVVREVEERVRRAAT

SEQ ID NO: 19355 - protein, 57 aa, Artificial Sequence
  Synthetic
DEEKEVEKVVRDVEDKLRRLLEENRDVSRKIKRELEELLKELKRSVDDSKEKLERKL

SEQ ID NO: 19356 - protein, 56 aa, Artificial Sequence
  Synthetic
IKTVLEEIKKLAKEAEEEIKRTLERVKKLLEEVRRVVEELLRRNRTLLREIVRKAK

SEQ ID NO: 19357 - protein, 57 aa, Artificial Sequence
  Synthetic
DEERELEEVVKDIERRSKKVVEDNRRVSEEIKRRLEKLLEENRKSAEDSKEMLRREL

SEQ ID NO: 19358 - protein, 56 aa, Artificial Sequence
  Synthetic
VKTIVTEVRDVVRRDKKKAEDTVRTVKELLDRARKKVEKTIRDNRKVLEEVVRKAR

SEQ ID NO: 19359 - protein, 57 aa, Artificial Sequence
  Synthetic
SELERVEKVVREVKKALEDLLRRNKESVDRSRTEARRLLEELRESVRRSEEMVRRKL

SEQ ID NO: 19360 - protein, 56 aa, Artificial Sequence
  Synthetic
VEKVLKEIRDLLREAAERVERSIRRNKKVLDDLKEVVERLLKENERLLREIVEDAR

SEQ ID NO: 19361 - protein, 57 aa, Artificial Sequence
  Synthetic
SAREKLRKVVEEIRRELKRLLEENKKVSDDIRRKLDELLKELEKSVKESIDTLRRDL

SEQ ID NO: 19362 - protein, 56 aa, Artificial Sequence
  Synthetic
VDTIVKELRELLKRAEEEVKKTSDRVADLVRRAEEVVKKLLRENEELLRRIVETAR

SEQ ID NO: 19363 - protein, 57 aa, Artificial Sequence
  Synthetic
SEKEKVEKVVDEVRRRLEDLLRRNRESVRRSDEELKRLLKRNKEVSDEIRKRLRREL

SEQ ID NO: 19364 - protein, 56 aa, Artificial Sequence
  Synthetic
VKTVLREIRELLKEAEERVKKSIKENEDLLDDVRRKVEESTERVERELERVSREAT

SEQ ID NO: 19365 - protein, 57 aa, Artificial Sequence
  Synthetic
DEDREVEEVVKEVEERLRRLLKKNEDVSREIEKRLKELLEKNKRSVEKSEEMLRRKL

SEQ ID NO: 19366 - protein, 56 aa, Artificial Sequence
  Synthetic
VDRVLEEIRELLKRVKEEVERTSRDVKEVLRRAEEEAKRTDDENRKLLEEVVEKAR

SEQ ID NO: 19367 - protein, 60 aa, Artificial Sequence
  Synthetic
DRSKEVVDRLEEELRKVKEDSKESVDRLRRLLEEVERRAEKSLRDSKEVLRRVKEEAERD

SEQ ID NO: 19368 - protein, 55 aa, Artificial Sequence
  Synthetic
RELEKVVRDIIDRVRKMLETSEEVIREVLERVRKVLEENRRVNKDIIDKVEERVR

SEQ ID NO: 19369 - protein, 60 aa, Artificial Sequence
  Synthetic
DEIERLIEEIKTVLDEIRKEAKRMIDENKRLLDEIRELSERVVEENRRLLEEIRDRAEKR

SEQ ID NO: 19370 - protein, 59 aa, Artificial Sequence
  Synthetic
KELADELRKVLKDVRREIEKLVRDAEKSNEDSRREVERLVKRNRESLEEIRKRVEDLVK

SEQ ID NO: 19371 - protein, 57 aa, Artificial Sequence
  Synthetic
SSKETLRKEVERLEKELKKLVDESRRVLEEVEREVRRAVRELEESVKKSAKRLRDRV

SEQ ID NO: 19372 - protein, 56 aa, Artificial Sequence
  Synthetic
VEKLIRRVEELLERVRELVKKNIREIEELLERLRRLVEKVIEDDKRMLKEVEEEAN

SEQ ID NO: 19373 - protein, 61 aa, Artificial Sequence
  Synthetic
REVEELIKRIERLLDEAREHSKEVIRRDEELLRRVRKIIEEIIREIERLLREAEDIARKRG

SEQ ID NO: 19374 - protein, 59 aa, Artificial Sequence
  Synthetic
EELLKRIEDVVRRVVEDLKRLNEEIRRSSEETEKELRRLLEEIRKVVEDVERRVRELVK

SEQ ID NO: 19375 - protein, 61 aa, Artificial Sequence
  Synthetic
DEVREVIKAIRKMLEEAEKHSRDVIRADKELLDKIARHSEEVIKEIRRLLRELEKIAKDKG

SEQ ID NO: 19376 - protein, 59 aa, Artificial Sequence
  Synthetic
EDLLRRIEEEVRRVVEALEKLNRDIEESSRRTEDTARKLNERIREVVEEVMRRVRKLVE

SEQ ID NO: 19377 - protein, 61 aa, Artificial Sequence
  Synthetic
SEVERVIEEIRKLLEDAKRHSDEVIKTDEDILRKVKKHSEEVIREIEKLLEEIEELARRRG

SEQ ID NO: 19378 - protein, 59 aa, Artificial Sequence
  Synthetic
EELLRRLEKLVEDVMRTLKKLNDEIRKSVDETEKTLEELNRRIRKTVEEVRKTAEDLVR

SEQ ID NO: 19379 - protein, 61 aa, Artificial Sequence
  Synthetic
DEVREVIRRIEKLLEDVKRHSERVIREDRKLLRDAERRAKEVIDEIRRVLEEAKEIVRREG

SEQ ID NO: 19380 - protein, 59 aa, Artificial Sequence
  Synthetic
EELLKTITDVVRKVEETLKKLNDEIRKSVEDTMRALKKLVDDLRRVVKEVEDRVREEAR

SEQ ID NO: 19381 - protein, 61 aa, Artificial Sequence
  Synthetic
DVVREVIKTIKKILDEVRDHTRRSIERNEKLLRDIRKIVEDSIRRNRKLLDDAKKVAERDL

SEQ ID NO: 19382 - protein, 59 aa, Artificial Sequence
  Synthetic
EEMVKTLKKVVEDVERELRRLNKEDEDTVREIAEAAERLVRDDERTVREIEEALKELVR

SEQ ID NO: 19383 - protein, 61 aa, Artificial Sequence
  Synthetic
DVIRDVEKKIRDILERVREHTKKSIKENRDILDDVRRHTEKSIKENEDILDEVRRVAERDL

SEQ ID NO: 19384 - protein, 59 aa, Artificial Sequence
  Synthetic
EEMVKRAKDVVDDVARRLEELNREDKKTVEEIVETAKELNERDKETVERIRKKLEDLVK

SEQ ID NO: 19385 - protein, 61 aa, Artificial Sequence
  Synthetic
DAVRKVIEDIKRALEEVRRHTKESIKRNEDILREVEKIARDIIREIRRILERVREVVERDL

SEQ ID NO: 19386 - protein, 59 aa, Artificial Sequence
  Synthetic
EEAVETLKRVVDDVAKKAKELNREDEETVRKIVEELKRLLDELRREVERVADEARRAVK

SEQ ID NO: 19387 - protein, 61 aa, Artificial Sequence
  Synthetic
SVAEEVIRRIEEILKRVEEHTRESIERNKKLLEEVRKHTEDVIRRIRELLERLERVVRRDL

SEQ ID NO: 19388 - protein, 59 aa, Artificial Sequence
  Synthetic
EEMVKRVKDVVDDVVRRLKDLNETDRRTVDEIVKEARRLNDELRKVVEEVEEKARRDVK

SEQ ID NO: 19389 - protein, 59 aa, Artificial Sequence
  Synthetic
DEVREIIERIKKLLDDIRKVAEESIRRNEKLLEEVRKRVRESIEELKRIKEEVEKLARE

SEQ ID NO: 19390 - protein, 59 aa, Artificial Sequence
  Synthetic
EDVVRTIEEVVRRVEKELRRLLEENERVIREIERELKKLVDDNKRVSDEIKDRAERLVD

SEQ ID NO: 19391 - protein, 59 aa, Artificial Sequence
  Synthetic
SEVEDIIRKIEESARRSEKVVRDSIRENRRLLEEVKREVDRSIERLEDIIRKVEEVARR

SEQ ID NO: 19392 - protein, 59 aa, Artificial Sequence
  Synthetic
ERAVDTIRRVVEKSKTVSKKVLDENREVVREVDERVRELVRKNEDVSRKIEERARRLLK

SEQ ID NO: 19393 - protein, 59 aa, Artificial Sequence
  Synthetic
DEEEEVERVVKEAEETIRELLERDKRVVKRLREEADRVLDEVREEVKRSEETAEDLRRK

SEQ ID NO: 19394 - protein, 56 aa, Artificial Sequence
  Synthetic
GEKLIKELEDVLRELEERSRKTLEELKDVLRKVKETIDELIRTNRRELEKLERDTR

SEQ ID NO: 19395 - protein, 59 aa, Artificial Sequence
  Synthetic
SEEEEVAKVVEDVRRRLEELKRAVEEVIRRTDEEAKRLLEADRRVVERVREEVKRLVEA

SEQ ID NO: 19396 - protein, 56 aa, Artificial Sequence
  Synthetic
GKELIKRLRDELKRLEDDARRILERNKKILEDVERESRRTLKELKDVLKELEERAR

SEQ ID NO: 19397 - protein, 60 aa, Artificial Sequence
  Synthetic
SLVEELERVVKDVEREARKLNEHNRENSKRVEDRLRELNEHLRKNTEEVKRRLEELIRKK

SEQ ID NO: 19398 - protein, 59 aa, Artificial Sequence
  Synthetic
EDAIREVLRRIERLLEEVKKKNEETSKRSKELLEENAKRNKEVSDRSKRLLEEIKRRAD

SEQ ID NO: 19399 - protein, 60 aa, Artificial Sequence
  Synthetic
SLTERLREVVRRVEEELKELIRHLRENSERVRKTLEELNRHLKENVEDVKRKLEDLIRKK

SEQ ID NO: 19400 - protein, 59 aa, Artificial Sequence
  Synthetic
KDAVERVIEEIERLLDEVKKTVEELSKTSKKLLDENKKENEDVSRKSEELLKKIADEVK

SEQ ID NO: 19401 - protein, 60 aa, Artificial Sequence
  Synthetic
SLKERLEEVVRRVRKELKKLIEHLERNVEEVRKTLEELNRHLDENVKRVKDTLTRLIEEK

SEQ ID NO: 19402 - protein, 59 aa, Artificial Sequence
  Synthetic
KDEFERVLKRIKEVLDEVKREVEELSKESEDLLRKNEERNKRASDRSEDLLKKIAEEVK

SEQ ID NO: 19403 - protein, 60 aa, Artificial Sequence
  Synthetic
SLLEELEKVVEEVKRSLDEVNKRNKKNTDDVAKTLTDLNEHLERNVRKVEEDAKDLVRKK

SEQ ID NO: 19404 - protein, 59 aa, Artificial Sequence
  Synthetic
EKLAKDVLREIRRVLEEVKRDNDRTSKESKDLLDENKKRNEEVSEESERLLRDIARKVD

SEQ ID NO: 19405 - protein, 60 aa, Artificial Sequence
  Synthetic
DLLEELKDVVDKVRRTLERLNEENRKNVEDVKRRLDDLNRKLEDNVRRVEERARELIKRK

SEQ ID NO: 19406 - protein, 59 aa, Artificial Sequence
  Synthetic
EKAVRDVLKEIEELLRKVTKENKDTSDESRRLVKTNEDLNREASKRSEDLLARVEEKVR

SEQ ID NO: 19407 - protein, 60 aa, Artificial Sequence
  Synthetic
SLTERLAEVVKRAEDLLRKLNEENKKNVEDVERTLRKLNKDLKDSVDRSRREAEKLIRRK

SEQ ID NO: 19408 - protein, 59 aa, Artificial Sequence
  Synthetic
KDAIEKVLEDIERVLREVEKRNRETSRDSERLLRRNEEENRKALERDEKVLKEVADEVE

SEQ ID NO: 19409 - protein, 60 aa, Artificial Sequence
  Synthetic
SLEEALEKIVREVKETLERLNKENRDSVRETADTLRKLNEELRRNVKRVEEALRDLIREK

SEQ ID NO: 19410 - protein, 59 aa, Artificial Sequence
  Synthetic
EEEAKRVLRKIEEDLKRVADINRKTIERDKKLLEDNERKNRKVSEESRELLEKIAKDVK

SEQ ID NO: 19411 - protein, 60 aa, Artificial Sequence
  Synthetic
KEVEEIIEEIKDRLRRLEETVERLLRENREMLRRTREEVKEIIKRIRDLLRELKKIAEKD

SEQ ID NO: 19412 - protein, 59 aa, Artificial Sequence
  Synthetic
KKLVEDVDKVVKEVEDRVRRLIEALKKVSEDLHRENKKLIEELEEVVKEVKERARELTR

SEQ ID NO: 19413 - protein, 60 aa, Artificial Sequence
  Synthetic
DEVKEIIKRIEDLLEDLKRKVERILREDERSLEESRKKVEEILKEIEDVLRKLKKDVEED

SEQ ID NO: 19414 - protein, 59 aa, Artificial Sequence
  Synthetic
ESAIKELRDVVREVKKRAKELIERLRESVERSRETNERLIRELEDVVRRVEETVRRLIK

SEQ ID NO: 19415 - protein, 60 aa, Artificial Sequence
  Synthetic
KKEEKIKRSVERSKEENERLIEELERSIRDTARRAEKLIERLEKVVREVDKRLRELREEG

SEQ ID NO: 19416 - protein, 56 aa, Artificial Sequence
  Synthetic
VETVLREDEDTLRRSEEKVDKLIKDDRRLLEELEDKVRELLRTVKELLKRTEERVT

SEQ ID NO: 19417 - protein, 60 aa, Artificial Sequence
  Synthetic
SSEERLKESIDRSKKRNKEAIEELEKSIRETEKTLEELIKTTRKSIEDVRKRLEDLERKG

SEQ ID NO: 19418 - protein, 56 aa, Artificial Sequence
  Synthetic
IDTLIEEDKETLRRSDEEVRRLIDEDRRLLEEVEKRARESNKEIRDLLRRVEEEAR

SEQ ID NO: 19419 - protein, 60 aa, Artificial Sequence
  Synthetic
SEEDELRESVKDSERRLRRLIEEDKRVVEEVEEENKRLIDKVREVIKRIEDRLDELRRRG

SEQ ID NO: 19420 - protein, 56 aa, Artificial Sequence
  Synthetic
VKEAIRRDRELLKRAEEESRRTLEEMRTSLEESKRRVEELIKTLKRLLDEAEKEAK

SEQ ID NO: 19421 - protein, 60 aa, Artificial Sequence
  Synthetic
SSEEKVEESIRRSKKRLEELIRDVERVVRKVEEDNRRLEEKLRKSIEDTRRKLEELKRRG

SEQ ID NO: 19422 - protein, 56 aa, Artificial Sequence
  Synthetic
FETLIRDDKRLLRKVEEDAKRLIKEIRDSLRESEKRVEELIDRDRRLAKEVEDRAR

SEQ ID NO: 19423 - protein, 59 aa, Artificial Sequence
  Synthetic
SSEERLRESIKRSKKRLEELIREVRKRIEEIRRKNEELIREVEEVIRRIREELKRLRDE

SEQ ID NO: 19424 - protein, 56 aa, Artificial Sequence
  Synthetic
IDELIKEDERLLREVEKKVKEIIKRLDDSLRDSERRAKELIRELEELLREAEERAK

SEQ ID NO: 19425 - protein, 59 aa, Artificial Sequence
  Synthetic
SSEDRLRKSIEDSRKRNEELTRALETVIREIRKRNARLIEEVKKVVEEVKRELERLREE

SEQ ID NO: 19426 - protein, 56 aa, Artificial Sequence
  Synthetic
IDTLIKRDRETLKESEDRVRKLLEDLRRSLRESEKEARRLIEEIRTLLEKVAREAT

SEQ ID NO: 19427 - protein, 56 aa, Artificial Sequence
  Synthetic
SEVEDVLRRIRELLEEVRELVERNLKEIKRLADEIERLAKENLERSRRLAEELRDG

SEQ ID NO: 19428 - protein, 59 aa, Artificial Sequence
  Synthetic
EDAVERVERILRDADEKIKELARESERLNRELDELIKRLVDESRELNRELEEIVRERAR

SEQ ID NO: 19429 - protein, 56 aa, Artificial Sequence
  Synthetic
REVEEVLKKIEDLARELTKKVRKNLEDIKKLAEEIRELAERVLRTSRELIKELRDG

SEQ ID NO: 19430 - protein, 59 aa, Artificial Sequence
  Synthetic
RELLEEVRKILEEMRRRVDELVRRSEELNRKLRELVERLVKELEDLNDEAKKIVDDRAR

SEQ ID NO: 19431 - protein, 56 aa, Artificial Sequence
  Synthetic
REVEEILKKIRTLLEEVKRRVEKNLEDIRKLLKELEDRVRRDLDEIRRLAEELRDG

SEQ ID NO: 19432 - protein, 59 aa, Artificial Sequence
  Synthetic
EKLLAEVRKVLKEAEDKIRELVERSKTINTEVKKEVDRLVEESKKLNKELEDEVDRRAK

SEQ ID NO: 19433 - protein, 56 aa, Artificial Sequence
  Synthetic
REVEEVLKKIRELIETLEELVRDDLRRIEELLRRIEDKVRENLRRIREVIKELRDG

SEQ ID NO: 19434 - protein, 59 aa, Artificial Sequence
  Synthetic
EDLLKRVKELLDDIRRKVDELIDRSRRLLEDLRRRVKELAEESKKLNEEAEKIVEDRAR

SEQ ID NO: 19435 - protein, 56 aa, Artificial Sequence
  Synthetic
KEVEEVLKEIKDIAEEIRELAERDLKRDKELVDEAEDLVRRNLEDIRRVIEELRDG

SEQ ID NO: 19436 - protein, 59 aa, Artificial Sequence
  Synthetic
EELLRRVEKLLEDLKRTVDEMVKRSEDSLRRSEETVRELEERSRRLNDEIRRIVDERAR

SEQ ID NO: 19437 - protein, 58 aa, Artificial Sequence
  Synthetic
SEVDKVVKEIKEKLDEIRKEVEKVVREDERLLEEIERLARKVVRENKELLKDIRREGR

SEQ ID NO: 19438 - protein, 59 aa, Artificial Sequence
  Synthetic
ETVARKLEEVVREVEEEVRRLEEKLKRSVEETEREIRRVVKELEDSVRETEREVRRLSK

SEQ ID NO: 19439 - protein, 60 aa, Artificial Sequence
  Synthetic
DDVEKLVRDIERLVEKVTRDNKKTVDDDKTLVDEARKENEETVERIKRELEELEKRVRKD

SEQ ID NO: 19440 - protein, 60 aa, Artificial Sequence
  Synthetic
SEEATRKLEKVLRDLEEELKRVDRENEKSLRESRKIVEDLDRTNKRVVDELRRIVEELRK

SEQ ID NO: 19441 - protein, 60 aa, Artificial Sequence
  Synthetic
DEIDDVLRKIEDLVRKLRELVKKVLEDSKRLLEEIKRLAKEALERSEELVRRVEELARRG

SEQ ID NO: 19442 - protein, 59 aa, Artificial Sequence
  Synthetic
EEVIRKLEEAVKRAEELVKRIEEELRKVDEEVERLVREIEKELREVNDRLRRLIEEIAR

SEQ ID NO: 19443 - protein, 61 aa, Artificial Sequence
  Synthetic
REIEEALKEIEKIIEDLRKIVEEVLKRLEEIDRELRKRNEDSNREIEKIIEDLKDMVRKKG

SEQ ID NO: 19444 - protein, 60 aa, Artificial Sequence
  Synthetic
SEEAERRAETVLRKLERVVDKVIKDIRKVLKDNERVVREVRKSAEELLDKLRKVVEEVRR

SEQ ID NO: 19445 - protein, 61 aa, Artificial Sequence
  Synthetic
REIEDVLRRIEEIIRELEERNKKSNKEIAEIDKELRDRNRKSNEEIEKIIEDLKEAVERKG

SEQ ID NO: 19446 - protein, 60 aa, Artificial Sequence
  Synthetic
SEEAEKRIRDVLDKLREVVERVIRSIEDMLRRNEKVVREVKESIERALKRLEETVKRVRD

SEQ ID NO: 19447 - protein, 61 aa, Artificial Sequence
  Synthetic
DEIEKMLRDIEEIIKRLRKIVEEVRDTLRRIDEDLRRRNEESNRRLEKIIEDLERVARRDG

SEQ ID NO: 19448 - protein, 60 aa, Artificial Sequence
  Synthetic
DKKAEDEIRKALRKLKEVVKKVLKEIAEMVERNDRELRRLEKSIRESLDKLRETVKRLED

SEQ ID NO: 19449 - protein, 57 aa, Artificial Sequence
  Synthetic
DLVEEIRKTIEKIVREIRKVLDEVRKHTEDVIRDIRRVLKEVERHSREVVKRIRDER

SEQ ID NO: 19450 - protein, 56 aa, Artificial Sequence
  Synthetic
KDELRKLVETLEKVVREVEEELRRLNEELEKVVREVEKRARESNDRLEKVVREVER

SEQ ID NO: 19451 - protein, 60 aa, Artificial Sequence
  Synthetic
SEVDEVVKEIRKLVEDDEREVEKAIRDIRRSNEELRERVERLLEELERLIKEVEETVRRM

SEQ ID NO: 19452 - protein, 58 aa, Artificial Sequence
  Synthetic
EAVEKARKILEEVEKVVTDTEKKLDDIRKHVKEVVDRLRKEIEDVLKRVRDVAERERR

SEQ ID NO: 19453 - protein, 60 aa, Artificial Sequence
  Synthetic
KVEELLKELLDRVKEVVDRIRRELEKALEESRRVVREVEERVKTANREVRKVVDDVRKRS

SEQ ID NO: 19454 - protein, 59 aa, Artificial Sequence
  Synthetic
EEDVRRVLEEIARLVRELEKMVRDVVKTSRDTVRKLREDVKKVVDENRKLAEKLKRDAD

SEQ ID NO: 19455 - protein, 60 aa, Artificial Sequence
  Synthetic
RIRETLTKLLEDVKEVVRETDELLKRLNRRVREVVRETEERLEDLNREVRKVVRDIERET

SEQ ID NO: 19456 - protein, 59 aa, Artificial Sequence
  Synthetic
EETVKDIVRKVKRLLEENRKLAEKITRDNEELLKENKEMLDEVRRRNTELLKRLREEAK

SEQ ID NO: 19457 - protein, 60 aa, Artificial Sequence
  Synthetic
RIEEDATRLIKEVKDVVKETEERARKVNKEVRDVVRDVERRLKELNEEVERVIRDVKRRS

SEQ ID NO: 19458 - protein, 59 aa, Artificial Sequence
  Synthetic
EKIADDVAKEIEDLVRRNREVVTEIEKKNRELVRRLRDMVRKVEEDNKRLLEELKKATD

SEQ ID NO: 19459 - protein, 60 aa, Artificial Sequence
  Synthetic
SVRELVEEARKHSRKVAEESRKLVEDLTEESKRVIDESREKVERLREEIERVLREVKKEG

SEQ ID NO: 19460 - protein, 56 aa, Artificial Sequence
  Synthetic
IERVLEEVEESDKRDEERVRKLEREIRESNKRDKEIVDRLLDELRRIVEELRERAR

SEQ ID NO: 19461 - protein, 59 aa, Artificial Sequence
  Synthetic
SVDEAVDELLKNSEEVIKDTERKARELLRHSREVNKRSERESERLKEEIERVLRKLKRD

SEQ ID NO: 19462 - protein, 56 aa, Artificial Sequence
  Synthetic
IEELVERIKDSNRRDKEIIKDLERKIRESDKRHKERVDDLARRVEEIVKELEEAAR

SEQ ID NO: 19463 - protein, 57 aa, Artificial Sequence
  Synthetic
SEVKKVEKEAEDISRRSRELLEKIREEVERLSRRSEELLKDVERKVRKVIKEIEDKR

SEQ ID NO: 19464 - protein, 56 aa, Artificial Sequence
  Synthetic
EETVRELIRDLRRNTKRVKEEADEMIRHLRENTERVEKRLRELREELKKVVERVRK

SEQ ID NO: 19465 - protein, 57 aa, Artificial Sequence
  Synthetic
EMVDRATEKVRTLSDESRRLLKKVRDENRKTSERSKRLLDEIERRVKEVLKRIRTER

SEQ ID NO: 19466 - protein, 56 aa, Artificial Sequence
  Synthetic
KDRVKRLIEELKENTERVEKSLRDLDRHNRRNTEEVKRSADELIEELKRVVDEVKK

SEQ ID NO: 19467 - protein, 57 aa, Artificial Sequence
  Synthetic
DKADEIEETVRRVSETSERLVEEVRKDNERTSKRSDDLLKDIEDKVRKVLERMRRER

SEQ ID NO: 19468 - protein, 56 aa, Artificial Sequence
  Synthetic
EEKVRRLIKELRDNTKKVAEELKKLDDHNERNVEEVKKRLEELIRRLEKVVEDVKR

SEQ ID NO: 19469 - protein, 57 aa, Artificial Sequence
  Synthetic
DFVKKAKDDVKEVSKESEKLLREIEEEVRRVSKRSRELLETVRRRVEKVLRDMERER

SEQ ID NO: 19470 - protein, 56 aa, Artificial Sequence
  Synthetic
EDRVRELIKELEENTRRVEEKLRKLIEDLKRNVREVEERARRLIEELREVVERVKT

SEQ ID NO: 19471 - protein, 60 aa, Artificial Sequence
  Synthetic
SDLERLKREAEELIERDKRLLRRVEEESRRTLEEDRRSLKESEDRARELIRRIEELAKKI

SEQ ID NO: 19472 - protein, 59 aa, Artificial Sequence
  Synthetic
DEMRDAARRLIEEITRSVEESERELKRLIEEDKRSVERSKKENDKLIEEVRRVVERVTK

SEQ ID NO: 19473 - protein, 60 aa, Artificial Sequence
  Synthetic
DVEEVLRKLKKEVEEVIRRTEAEVAKVLKEVEKVVTETREEVRRVLEEVKRVVDDVRRRN

SEQ ID NO: 19474 - protein, 56 aa, Artificial Sequence
  Synthetic
VEEVRKTVEKLIDDNRRMLEEVVKRAKELIEHNRRVVDKVLKEAKKIVRDLEETVR

SEQ ID NO: 19475 - protein, 60 aa, Artificial Sequence
  Synthetic
SVEEVLKKLLEEVRRVAEETRRRAEKLLDDDRKVAEESKKRAEELLKEVKDRVDDVRRRN

SEQ ID NO: 19476 - protein, 56 aa, Artificial Sequence
  Synthetic
MEKVARTIKKLIKENRKFLEEVEKRSRETLKTNKKVLRDLEKRAKKIIEDLERTLR

SEQ ID NO: 19477 - protein, 57 aa, Artificial Sequence
  Synthetic
KIEELMKRLEDEAKRSLDESEKKLEELRRDSERSVREVEELLKELLDRARRVLEKLG

SEQ ID NO: 19478 - protein, 59 aa, Artificial Sequence
  Synthetic
EEEVKRVAREVEELIERNRRHSDRIAEEVKETLERNREKVRRVLEKLKKELEDVLEKRK

SEQ ID NO: 19479 - protein, 56 aa, Artificial Sequence
  Synthetic
DIEELARRLEEAVKDSLRRVEEKLRRLEDESRRSVEDSDRKLKELIDRVRKVLKDL

SEQ ID NO: 19480 - protein, 59 aa, Artificial Sequence
  Synthetic
DEVVRRVARRIEELLKENDDLVRRVAEEIKRTLKENNEHSDDLRRRIEELIKEITERRR

SEQ ID NO: 19481 - protein, 56 aa, Artificial Sequence
  Synthetic
DIEELLERLRRRVEKSLEDSDRLLRKLEEDSKESVKRVKRLLEELIKRVKEVLKKA

SEQ ID NO: 19482 - protein, 59 aa, Artificial Sequence
  Synthetic
KELVKRALEEIEKRLKDNRDHSRRLAETVKDTLDKNDKKVEEVRREIEELLRRLDEKRN

SEQ ID NO: 19483 - protein, 56 aa, Artificial Sequence
  Synthetic
DIEDLLRELRKRVEDSLKKSEDRLRRLEEKVKRSLDEVEKELKRLLDEAKKVVDKA

SEQ ID NO: 19484 - protein, 59 aa, Artificial Sequence
  Synthetic
DEEVRRVLERIDRLIKRNDDHSRKLEKEIEDLLRRNNREAEEVAKEVEKLLEDLERRRK

SEQ ID NO: 19485 - protein, 60 aa, Artificial Sequence
  Synthetic
REIEEVVKELDDLLRRNDERVKRILDELEELIKKHDRRSDEVTKEIRELLRKLEREVERD

SEQ ID NO: 19486 - protein, 59 aa, Artificial Sequence
  Synthetic
KEARELAEELKKRAKESVDRSKKALEELKKRAREAVRRSREKLKKLKREVEKVVREVRR

SEQ ID NO: 19487 - protein, 60 aa, Artificial Sequence
  Synthetic
DELREILERVRRVLERSKELSEELLRRVEEVLRRLRKHSRDLEEKVRRILTEIEKRARER

SEQ ID NO: 19488 - protein, 59 aa, Artificial Sequence
  Synthetic
KDLREKLDKLRRDLEEVLRRNEEIVREATRRIRKVLDENRKKVEELKRRAERVLEELRR

SEQ ID NO: 19489 - protein, 60 aa, Artificial Sequence
  Synthetic
DDLRRIAKEVEKVLKTSEDLSEELKKEVKRVVDESREDSKRLREEVRKVLEEVKRLADRN

SEQ ID NO: 19490 - protein, 59 aa, Artificial Sequence
  Synthetic
RELKEILKELKKELERVLEDNRRKVKELEDELREVLKRNEKIARELEKELRRVLEEVRR

SEQ ID NO: 19491 - protein, 60 aa, Artificial Sequence
  Synthetic
DELRELEERAKKVVDESRENSDRLAKKVKEVLKRSRELSDELRKEVERVLREIKERARRK

SEQ ID NO: 19492 - protein, 59 aa, Artificial Sequence
  Synthetic
ERLRDILDKIAREVERVLEENRRIVTELKKELEKVLDENRKIVEELERRARKVLKELRD

SEQ ID NO: 19493 - protein, 60 aa, Artificial Sequence
  Synthetic
DELRELLEEVRRMLRESRENSRKLAEEVERVLRESEEDSKKLKRDVEKILEDVRRKLERN

SEQ ID NO: 19494 - protein, 59 aa, Artificial Sequence
  Synthetic
DELRRILDELRRRAKKVLDDNRKIVRDLERELRRVLEENRKIVEELEKLLEKVLEELRR

SEQ ID NO: 19495 - protein, 60 aa, Artificial Sequence
  Synthetic
KELEELAKTVEDLLRENDRLAEEVLRTVDDLLRKNDEISKRLLDTARKLLKELKDLKREN

SEQ ID NO: 19496 - protein, 59 aa, Artificial Sequence
  Synthetic
EDVKRILEKLIRDVEKSLKDVDDRLRELIRRVEESLRRNEEILKEVERRAEEVVEEVRR

SEQ ID NO: 19497 - protein, 60 aa, Artificial Sequence
  Synthetic
DDAERLLEDVRRLLEENDRISEEVLKTVKRIVDENDRLAEELLRTVDELVKRLKELRERN

SEQ ID NO: 19498 - protein, 59 aa, Artificial Sequence
  Synthetic
ERIRKILEKVIKEVEDSLRRNSEIVERAVDRARESVKRVKEIVETVERKIRKVVDEVRK

SEQ ID NO: 19499 - protein, 60 aa, Artificial Sequence
  Synthetic
SEVEEVKDRVTKLLKENDDISKELEERVRRLLEENDRHSREVEKTVRKLLEDLKRLAEEN

SEQ ID NO: 19500 - protein, 59 aa, Artificial Sequence
  Synthetic
KRVKDILRRLVEEAEESLRRNEKKLRELEKRVRESLKRSHKINKELEERVKEVLDRVRD

SEQ ID NO: 19501 - protein, 60 aa, Artificial Sequence
  Synthetic
DEVERVLEEAKKLLDTNDDLLRKLDDTVRKLVEDNNRISEEVRERVERLLRRLEELVRKN

SEQ ID NO: 19502 - protein, 59 aa, Artificial Sequence
  Synthetic
ERVKRILDRVIKEVTDSLKRVEDRLRELIRRVEESLKRNREELRRLEERVKDVLDKARR

SEQ ID NO: 19503 - protein, 60 aa, Artificial Sequence
  Synthetic
DRLEDLLRDVKRLLEENDKHSKEVEERIRKLVEDNNEISRTVARDVEEKLKRLRERTEEK

SEQ ID NO: 19504 - protein, 59 aa, Artificial Sequence
  Synthetic
ERVRRTLEELTRRVEESLKRSHEINRKVIREIEKSMDENKKELERLIDRARRVLEDVRK

SEQ ID NO: 19505 - protein, 60 aa, Artificial Sequence
  Synthetic
SEAEEVLKRAEEILRENNKISRDLEEEVRRLLKENDDLLREVEETVERLLEELKELAKRN

SEQ ID NO: 19506 - protein, 59 aa, Artificial Sequence
  Synthetic
ERVKKILERVIRELEKSLKDNERKLRELEERVRDSLRRVEESLRRLERRVEEVLERVRK

SEQ ID NO: 19507 - protein, 60 aa, Artificial Sequence
  Synthetic
DEMEKLRKDVKKLLEDNNKISRDVEKTVEELLRRNDEHSKEVLKRVEDLLRELKKLKDDK

SEQ ID NO: 19508 - protein, 59 aa, Artificial Sequence
  Synthetic
EDVKRILEELKKRAEDSLRENEKRLRELIREVEKSLRRSHEINRDAERKVRKVLDDVRR

SEQ ID NO: 19509 - protein, 58 aa, Artificial Sequence
  Synthetic
SEIEELLERVKELLKRNRELVERVKRTVEELNKDNDRVVKEIEDEARRLLDELEKIMR

SEQ ID NO: 19510 - protein, 59 aa, Artificial Sequence
  Synthetic
DRMRRIAKKAIDDVRKSVEDSKRILDELRKSTEESVKRTRDILKRVLDEAKKVVEDLRR

SEQ ID NO: 19511 - protein, 60 aa, Artificial Sequence
  Synthetic
DELEELRTRVEKLLKENNDLVREVLKTVKKLNDENRKLVERILREVERLLRELREIAKTT

SEQ ID NO: 19512 - protein, 59 aa, Artificial Sequence
  Synthetic
EEMRKKAEELRKRVDESVKDTRKKLEELRKSTEKSVRDTDRILKDLERRAREVVDELEK

SEQ ID NO: 19513 - protein, 60 aa, Artificial Sequence
  Synthetic
DVEEAVRELRETLDKSVERSERTVRELVKKLETSVEETREEVERVVEELDRVVEEAKKDV

SEQ ID NO: 19514 - protein, 55 aa, Artificial Sequence
  Synthetic
KEVRKEVKELVERDEDLVRKIREKVEKVVKDNKDLLRRIREAAKRVVREIRERLR

SEQ ID NO: 19515 - protein, 60 aa, Artificial Sequence
  Synthetic
STMDEIRRIVEKVLKEDKDLAETADRLNRDSVRRDEELAERNKRTNERVVREIEDRLKKE

SEQ ID NO: 19516 - protein, 59 aa, Artificial Sequence
  Synthetic
KRLEDIVREVKKRLEDSLRDTERIVREVDERNKESLRRSKEIVERVNKLLRDVLERART

SEQ ID NO: 19517 - protein, 61 aa, Artificial Sequence
  Synthetic
SSKEVADELRKKAEKVLDELRKIIRELERKNEDSLRRTEEIVRRLEEEAERVLRDLVRTRG

SEQ ID NO: 19518 - protein, 56 aa, Artificial Sequence
  Synthetic
IEDLRRTVDKLVEEIKDLARKLAKSSDDTVREDEKLVEELRKDVKRIVRKIKKDLE

SEQ ID NO: 19519 - protein, 56 aa, Artificial Sequence
  Synthetic
SAEEVVRELDKELKKVLEDSRDLVRRLEEELRKVLEDNEEVVKEIERSSDDVLRKL

SEQ ID NO: 19520 - protein, 55 aa, Artificial Sequence
  Synthetic
DELLRRVKELVERARRHSERLLEEVKRLVDEIRERSKELLERARRLNEEMKERTR

SEQ ID NO: 19521 - protein, 60 aa, Artificial Sequence
  Synthetic
SDLEELFREVKELVDDNLRKSDKLRRDVEKRVRDNERRSEKVHEDNRRLIEKIERLVRRG

SEQ ID NO: 19522 - protein, 59 aa, Artificial Sequence
  Synthetic
DRVRTLVKELRERAKKSLDDNRRMVEELRKRLEESLRRNKRVVEESEKIAKEVLDKVRT

SEQ ID NO: 19523 - protein, 60 aa, Artificial Sequence
  Synthetic
KDAEDLERRVRELVEENNRVSKRLAEEVTRLVKENEDKVRELEKEVRDRAKELLDMKRRG

SEQ ID NO: 19524 - protein, 59 aa, Artificial Sequence
  Synthetic
ERLKKLVDELRETLERSLRENEKVADELRKRAEKSLEDVKRVVDELRKIVDDVLKRVED

SEQ ID NO: 19525 - protein, 60 aa, Artificial Sequence
  Synthetic
DDLEELFERVKRLLERNNEVSKKLEDDVRKLIEDNERRVERVHRENEKELRRIEDLKRRG

SEQ ID NO: 19526 - protein, 59 aa, Artificial Sequence
  Synthetic
ERVRRLVEELRKLLEDSLEKNKRLVDELRKRAERSLREVRKLVERSKREAERVLEEVRK

SEQ ID NO: 19527 - protein, 60 aa, Artificial Sequence
  Synthetic
SRVEEMFERIERLVRRNNEVSRRVHERNRELIKRNREKVKKVHDDNKKLIDDLRELKRRG

SEQ ID NO: 19528 - protein, 59 aa, Artificial Sequence
  Synthetic
ERVRRLVEEARRLLKKSKDDNRRVVKRSREEVTRSLREVEKLVDESRREAEKVLEEVKK

SEQ ID NO: 19529 - protein, 60 aa, Artificial Sequence
  Synthetic
KELEEAFDRVRRLLEENKRKAEEVHRTNEELVRRNNEKSERVHRENEKEIERLDRAKKRG

SEQ ID NO: 19530 - protein, 59 aa, Artificial Sequence
  Synthetic
ERVKTLLKELRDRLKESRETVKELVDRSREEVKKSKKRNKKVVTDSRRRIKDVLDKVRK

SEQ ID NO: 19531 - protein, 60 aa, Artificial Sequence
  Synthetic
KEAEDMLRKVRKLIKENEKHSREVADEVRKLVEDNDRKVDEVHERNRKLITDLRRLAEEG

SEQ ID NO: 19532 - protein, 59 aa, Artificial Sequence
  Synthetic
ERLKTVVTELEKRARDSLEKSKEINKRLREELKRSEERVERLVRKSEEEAKKVLDDVRR

SEQ ID NO: 19533 - protein, 60 aa, Artificial Sequence
  Synthetic
SEIEKLVEDVRKLVEDNLRHSEEVHRRNRRLIEENERKIDELEKRVRKLVEELRELAERG

SEQ ID NO: 19534 - protein, 59 aa, Artificial Sequence
  Synthetic
ERVRTLVDRLREELKRSLDESEKLNRESRKRVTRSLEKVDDLVRELEKLARKVLEEVKT

SEQ ID NO: 19535 - protein, 60 aa, Artificial Sequence
  Synthetic
SEVEEIFKRVTDLLKRNRDLVREILERSRRLVERNDREAKKILDDARRLIEELEDAVRKE

SEQ ID NO: 19536 - protein, 59 aa, Artificial Sequence
  Synthetic
ERVKKLLDELRERVKRSVEESRRVLDDSRRKSEDSLRRSEELLKRVEEIVERVAREVER

SEQ ID NO: 19537 - protein, 60 aa, Artificial Sequence
  Synthetic
SEVEEIARRVDKLLKDNKRTVDEILKESRRLVKENNELVDKILREVEELLRRLEDEVRKE

SEQ ID NO: 19538 - protein, 59 aa, Artificial Sequence
  Synthetic
ERVEKLLRELEKRVKESVDTSREVLKRSREDSKRSEDRTEKVLREARKRVEDVADKVRK

SEQ ID NO: 19539 - protein, 60 aa, Artificial Sequence
  Synthetic
REVEEIVKEVERLVRENDKVAKEIVDESKRLVEENRKRVEEIRREVEELIRRLEDAVRKE

SEQ ID NO: 19540 - protein, 59 aa, Artificial Sequence
  Synthetic
KRVKDLLEELRKRVKDSRKKSEELLEESERRSKKSLDDTRRVLKDARDIVEKVADEVRK

SEQ ID NO: 19541 - protein, 60 aa, Artificial Sequence
  Synthetic
SDVEEIKKRVKELLEENKRLVETIEREVRRLIEENRRLAKRILDEVRRLLEELKDRVDKD

SEQ ID NO: 19542 - protein, 59 aa, Artificial Sequence
  Synthetic
ERVKKLLTDARKEVERSLRESKKALDELRRIVEKSLRDTERLLRTAEKEVEDVLREVER

SEQ ID NO: 19543 - protein, 60 aa, Artificial Sequence
  Synthetic
SEVEKIFRDVEDLLRRNEETAKEILKTSEELVRRNEELVRRILEEVRDLIRKLREVVERS

SEQ ID NO: 19544 - protein, 59 aa, Artificial Sequence
  Synthetic
RRVEELLRRLAEAVKESLERSERLLRRSEEESRRSLKKTEDILREAREIVRKVAEEVKK

SEQ ID NO: 19545 - protein, 60 aa, Artificial Sequence
  Synthetic
REVEEIVKEVRRRLERNDEVAERIVRESERLVEENNRLVEEILRRVRKLIEELLDLVRKS

SEQ ID NO: 19546 - protein, 59 aa, Artificial Sequence
  Synthetic
ERVEKLLRDLEREVDESRKKSRKLLERSREESDRSLKTTEDILREAERIVEKVEEDVRR

SEQ ID NO: 19547 - protein, 60 aa, Artificial Sequence
  Synthetic
SDVEEIVRRAEKLVEDNDRVAEKIHEDNRRSNKRTLDEVRKILEEVRKLIKDLEDEVRRD

SEQ ID NO: 19548 - protein, 59 aa, Artificial Sequence
  Synthetic
ERVKRLLRRVEKSVRDSKRRSEKLLEDSERSSEKVEKDVRDVLKEAREIVRDVAEKVEK

SEQ ID NO: 19549 - protein, 60 aa, Artificial Sequence
  Synthetic
EEVERIVEDVRRLLEENRELVKRILDEVRKLIKENNRLAREILETVRTELEKLRDLVRKL

SEQ ID NO: 19550 - protein, 59 aa, Artificial Sequence
  Synthetic
ERVEKLLEELERRVEESVEESERVLREAEKIVRDSRKTTEELLEEAKRRVDEVAKEVKK

SEQ ID NO: 19551 - protein, 60 aa, Artificial Sequence
  Synthetic
SSVDEILKDVRRSNKENLDLVEKILRESKKLVEENRRLVKEILDRVRKLIKELLRLVRED

SEQ ID NO: 19552 - protein, 59 aa, Artificial Sequence
  Synthetic
EKVEDVLRRLKRTSERSLEESKKLLEESEKDSDRSRKESEEVLREAEEIVKRVLKEVER

SEQ ID NO: 19553 - protein, 60 aa, Artificial Sequence
  Synthetic
DDVETIVERVRELLEENNRLAREIVERVEKLLKDNDDLVKEILEEVDRRIRKLEEAVKRD

SEQ ID NO: 19554 - protein, 59 aa, Artificial Sequence
  Synthetic
RRVEELLRKLEEDVKRSLEDTKRLLDELKKKVDESRKRSKDVLDKAREIVDRVRRSVEK

SEQ ID NO: 19555 - protein, 60 aa, Artificial Sequence
  Synthetic
SEVEKIVRDVEESNKKTKKKVEDIEEEVKDLVRKNNELVKRILEEVKRLLEELKRVKKDD

SEQ ID NO: 19556 - protein, 59 aa, Artificial Sequence
  Synthetic
ERVKRLLDRLRRTSEEVLERVEEVLKKAEEIVRKSFEDSKRVLRKAEEDVKRVARDVEK

SEQ ID NO: 19557 - protein, 57 aa, Artificial Sequence
  Synthetic
SVDEAAKEAEEIVETVERESRKLLEDSRRIVEEVKKRSEEILEEVRRRVEEVVKESK

SEQ ID NO: 19558 - protein, 56 aa, Artificial Sequence
  Synthetic
LERLLEALRRVIDEDRKRSKKLHEENKRVIERDKEISDKLLDDLRKLVADLRRRAK

SEQ ID NO: 19559 - protein, 56 aa, Artificial Sequence
  Synthetic
REAEELEKEVKKVVDDSKKRLDELDEENRRVDETIKKISEDLTREVKDVIRRIRDG

SEQ ID NO: 19560 - protein, 59 aa, Artificial Sequence
  Synthetic
EELRELVERLRRRLETVNRELERRVRELKRSNDESHRENREVIEELIKELKKVLDDVRK

SEQ ID NO: 19561 - protein, 56 aa, Artificial Sequence
  Synthetic
DELREILRKVEKVVEDIERTSDKLRREVDKVVDDSRRKLEELEKEVKKVIEDIRDG

SEQ ID NO: 19562 - protein, 59 aa, Artificial Sequence
  Synthetic
DRLKEAVKELAKRLKDVHERNKRLIDTLREKLKRINDELERSVRELKKELEEVIDRVRK

SEQ ID NO: 19563 - protein, 56 aa, Artificial Sequence
  Synthetic
DEVEELKRRVDRLVEEIRKLSEELLKRNRDVDREIKKRVKDLEDKVRKVIRDIEEG

SEQ ID NO: 19564 - protein, 59 aa, Artificial Sequence
  Synthetic
RELDEVIKEIRRRLEKVHRDNRRVIDEVRRSNRDSERDIAEAVERLTRLLETVLEKVKT

SEQ ID NO: 19565 - protein, 61 aa, Artificial Sequence
  Synthetic
DELEELRTTVTKLLEDLKKISDDLREEVRRLLEEVEEISKRLEETVRRIIKRVEDIVRRDG

SEQ ID NO: 19566 - protein, 59 aa, Artificial Sequence
  Synthetic
KDVKEVVKKLRDELRRVLERNKEVIDRLREKAREVLEKDRKLVDDLREEAREVLERVKT

SEQ ID NO: 19567 - protein, 61 aa, Artificial Sequence
  Synthetic
DELEEIKKEVEELVKTNERIVDKLREDNKRLVEEVKRISEELEREVRRIIREVREIVKRDG

SEQ ID NO: 19568 - protein, 59 aa, Artificial Sequence
  Synthetic
KDVEKLLRELEEEAKRSLKRNRDVIEKLREENKRLLDDDRRVVEELRKEAKDVLDEVEK

SEQ ID NO: 19569 - protein, 61 aa, Artificial Sequence
  Synthetic
REVDELKKTAEKLIRDDERLVEEVLRTSKKLVREDEDMVRKLRKTIEDLIRRLTDVAREEL

SEQ ID NO: 19570 - protein, 59 aa, Artificial Sequence
  Synthetic
RDVKRVLDEVEKLVEDSKRETERVLRESEERSRRSLEETEKALKDLAKLAEDIKREVEK

SEQ ID NO: 19571 - protein, 61 aa, Artificial Sequence
  Synthetic
REVDELRKRIEDLVRRDEEVARKVLEDVRRLVRRNREKARELLERVEKLVRDLKRVADRDL

SEQ ID NO: 19572 - protein, 59 aa, Artificial Sequence
  Synthetic
EEVKRVLDELRKLVKDSERKTKEVVEKVREDVKDSLRRSEEVLKRVKELVDRVADEVRK

SEQ ID NO: 19573 - protein, 61 aa, Artificial Sequence
  Synthetic
SDLEKLKERVDELIRRDDELVKRVLEESRRLVDRNKKKVDELRRRARKLIEDLKRVADRDL

SEQ ID NO: 19574 - protein, 59 aa, Artificial Sequence
  Synthetic
ERVKELLDRLRKKVEDSREKTERVLKESRELSDRSLERSEEVLERVRREVREVVERLKK

SEQ ID NO: 19575 - protein, 61 aa, Artificial Sequence
  Synthetic
DSLREVEKRIRELIRENEELVKEVLERSKRLVDEDRETAERLRKTVEELLKRLREVADKEL

SEQ ID NO: 19576 - protein, 59 aa, Artificial Sequence
  Synthetic
DEVRKALEDLKRTVDESERRTEEVLKESEDLSRRSLKETEDLLRELEKRVKEVADRVED

SEQ ID NO: 19577 - protein, 61 aa, Artificial Sequence
  Synthetic
SDLDEVRKEVKRLIDENRTLVDEIRRRIEKLIRENKKKVEELRKRAEELIRRLKEVADRDL

SEQ ID NO: 19578 - protein, 59 aa, Artificial Sequence
  Synthetic
RDVKRLLDDLKRLVKESLDETERVLRELRKEVKDSLRDSERALREVEDLVRRIKKRVEK

SEQ ID NO: 19579 - protein, 61 aa, Artificial Sequence
  Synthetic
DEVKKLEEDVRRLIEENEELVRRVKKTSDDLVKRNKEKVEELRKRVEDLIRRLREVERRDL

SEQ ID NO: 19580 - protein, 59 aa, Artificial Sequence
  Synthetic
DEVRKALERLRDEVRRSVTDTDRVLKESEDRSRKSLEDSERVLRELEELVKRILDDLAR

SEQ ID NO: 19581 - protein, 61 aa, Artificial Sequence
  Synthetic
SEVDRLRETIKRLLEENKELVERLRERVRKLIRENEKKVEELRDRAKKLIDRLREVRTRDL

SEQ ID NO: 19582 - protein, 59 aa, Artificial Sequence
  Synthetic
RDVERALKELRDRIEESLRRSEEVLKELEERVKESRDESRRVLEEVRRLVEEIKRRAEK

SEQ ID NO: 19583 - protein, 61 aa, Artificial Sequence
  Synthetic
KDVEDLEREIDRLLDEDRKVVEDLERKIKKLIDDNKRLVDKLREDVERLIRRLREVTEKEL

SEQ ID NO: 19584 - protein, 59 aa, Artificial Sequence
  Synthetic
KKVKEVLDELRKRVDRSLEEAEKALRRLEKLVRDSLRRSEEALERLKRLVDDVKKKVED

SEQ ID NO: 19585 - protein, 61 aa, Artificial Sequence
  Synthetic
SELDEVKRRAKELVDRDKKLVKEVLDTSRELVRRNEELVRRILEEVRKLIEDLAEVTKRDL

SEQ ID NO: 19586 - protein, 59 aa, Artificial Sequence
  Synthetic
KEVKELLDEVRRLAEESRREVERVLRESEKRSRESLKKSEDALERAKKLVEDIKDEVER

SEQ ID NO: 19587 - protein, 60 aa, Artificial Sequence
  Synthetic
SEEDKIREIVDRVLKESEKLIEEIERRVDKVLKRIKELTDEIKKRAEDVIREIEDIVRKE

SEQ ID NO: 19588 - protein, 59 aa, Artificial Sequence
  Synthetic
DELRKVVEEIKRELEKIDKKLEEVVRRIEKKLEDILKENSKAVREIRELLKKVKRELEK

SEQ ID NO: 19589 - protein, 60 aa, Artificial Sequence
  Synthetic
DEVEELKRRVEKLLEEIERLTKTHEDRSRRLIEDIRDSNRKLKEDAERLIKEIEELKRKV

SEQ ID NO: 19590 - protein, 59 aa, Artificial Sequence
  Synthetic
EELKKVVDDLRREAERILRRDEEAVKRSEKLLRDILEHVKRVVDEIREELKRILDRVRE

SEQ ID NO: 19591 - protein, 60 aa, Artificial Sequence
  Synthetic
DEVREIEKRVRDLIREIEKSNRDLEREAKRLIDEIDDLSRKLKEDADKLIEEIKELKKKV

SEQ ID NO: 19592 - protein, 59 aa, Artificial Sequence
  Synthetic
EEVRRVVEKLRRLLKTITEHVKEVLDRLRREAEDALRRDKEVADRIREEARRILEDVKK

SEQ ID NO: 19593 - protein, 60 aa, Artificial Sequence
  Synthetic
DDVKRIEKEVRRLLREIERLTREHEKESRELVREIEELSRRLEEEIKRLIEEIEELRKRV

SEQ ID NO: 19594 - protein, 59 aa, Artificial Sequence
  Synthetic
KEVRDVVKRLEEEIREVLAKDEEVARRSVEALADILRRDKDVVDRIRKLLKEILDRVRK

SEQ ID NO: 19595 - protein, 56 aa, Artificial Sequence
  Synthetic
DREEVVKEIKKRLEDLNRRVREVVKKIDRELEKLLEESKRVVDDLRRRLEELKKRI

SEQ ID NO: 19596 - protein, 56 aa, Artificial Sequence
  Synthetic
ERELERLVKEVEKTNERLLDELRKAAEEVAKRSEDTLRELRDIIKKVEERATDIAR

SEQ ID NO: 19597 - protein, 56 aa, Artificial Sequence
  Synthetic
SKEDVVREIEKTLKDLLDDSRRVVRESEERLKELNRRLREVVKESKRRLDEALRRI

SEQ ID NO: 19598 - protein, 56 aa, Artificial Sequence
  Synthetic
TEELRRLVDKVREDSERTLERDRRLAKEVSDRNKRLVEENRKIVEEVLKTIEELRR

SEQ ID NO: 19599 - protein, 56 aa, Artificial Sequence
  Synthetic
EREKVVKKIKEDLDRLNEEVKRVVDESRKLLKRLNERVEEVIREIRKTLEELTRRI

SEQ ID NO: 19600 - protein, 56 aa, Artificial Sequence
  Synthetic
ERELERLVAEVAERNKKLLKDDKDLARKVAEDNEDLLRRLRDEVEKVRRTADEIRR

SEQ ID NO: 19601 - protein, 56 aa, Artificial Sequence
  Synthetic
SREEVVDELRKRLEELNKEVREVVRESERKAERALEEVEEMVKRVREELEKLKRDI

SEQ ID NO: 19602 - protein, 56 aa, Artificial Sequence
  Synthetic
KDDLRRLLKEVAERNRKLLEDDEELAERVLREVRRLLEELRRRLKEIKERLDEIRR

SEQ ID NO: 19603 - protein, 56 aa, Artificial Sequence
  Synthetic
SREEVVRRADKLLKDLNKRVKEVIERSERKLRELNERVRDVVRKIEKRLEELERRI

SEQ ID NO: 19604 - protein, 56 aa, Artificial Sequence
  Synthetic
EEELKRVITKVLRDNEELLKTDEELAEDVARKNKKLLDDLEKTVKEVMDRAEELRR

SEQ ID NO: 19605 - protein, 56 aa, Artificial Sequence
  Synthetic
SREEVVRDIERRLRELNKRVADVADESRRRLEELNEKLRRVVEESRRRLEELRKEI

SEQ ID NO: 19606 - protein, 56 aa, Artificial Sequence
  Synthetic
DDTLRREVKKVERENERLLEEDRRLVREVTRRNEKLVKDNREIVKEVLERAKELTR

SEQ ID NO: 19607 - protein, 56 aa, Artificial Sequence
  Synthetic
SREEVVKEIKDRLKKLNDDVKRVIKESEDLLRKLNEEVRDVVRKIEETLEELLRRI

SEQ ID NO: 19608 - protein, 56 aa, Artificial Sequence
  Synthetic
EERLKEVVAKVAKENKDLLRRDEELARRVAERNKKLVEDLRRLVEEVRRRAEELRR

SEQ ID NO: 19609 - protein, 56 aa, Artificial Sequence
  Synthetic
SESERVEELLKEVAKRVKEVSDRSKRLLEEIERRVKEVSDESEELLRRIIDEAKKV

SEQ ID NO: 19610 - protein, 56 aa, Artificial Sequence
  Synthetic
ERVVDRVRRELEKLIKDLEENSREVERSLRELIEHLKKNVEDVEREAKRVIDELKT

SEQ ID NO: 19611 - protein, 60 aa, Artificial Sequence
  Synthetic
SLEEKLRRVLDELRKTIETLLKTNKDVLKKLEEDVKRIIRRNEEVLRDLERKVRDLKKKG

SEQ ID NO: 19612 - protein, 59 aa, Artificial Sequence
  Synthetic
ERLKRVVDELRKRAKKLLEDVERVIRKSEEEARRLLREVEKVVRELDREAEKLVEEVRR

SEQ ID NO: 19613 - protein, 60 aa, Artificial Sequence
  Synthetic
SSEETLRDILKKVEERSEETLRHNERVLEEVRKEVERILRRNEEVLRRLEKEAKELKKRG

SEQ ID NO: 19614 - protein, 59 aa, Artificial Sequence
  Synthetic
ERLKRVVDDLERRIRELLERDERVIRRTEEEARRLLDDVRRVVEELDKRAEDVVKEVKD

SEQ ID NO: 19615 - protein, 60 aa, Artificial Sequence
  Synthetic
DEEETLKKILDDVRKVSRDTMEENKTFLEELSKVADKIIRDNEKVLDDHRKAAEELKKRG

SEQ ID NO: 19616 - protein, 59 aa, Artificial Sequence
  Synthetic
ERLKRVVDDIRRSLEELLKRDEEVVEESRKEVKRLEEEVREVVTRSDKLMDELLKKVKR

SEQ ID NO: 19617 - protein, 61 aa, Artificial Sequence
  Synthetic
SEKEEVLREAREEAKDIERRLERLLERDKEVIDRVEKDLERLLRENKKLIDDVRRRVEEEG

SEQ ID NO: 19618 - protein, 55 aa, Artificial Sequence
  Synthetic
EVMDEIRRLAERVERRLREVLERSKKLVDDLRERLKEVLKRIEDLYRRLEEEADR

SEQ ID NO: 19619 - protein, 60 aa, Artificial Sequence
  Synthetic
TAKEVLDEIRKVHEDLNRKIEEVLKHSEDVLREVEERNERSVRHSEDMLRRLEERIDRKG

SEQ ID NO: 19620 - protein, 59 aa, Artificial Sequence
  Synthetic
EEVLRKLLEENKKEIRRLEEELKRLNEEVKKRIKELEDSSRKENDRVRERIRELDERVK

SEQ ID NO: 19621 - protein, 60 aa, Artificial Sequence
  Synthetic
TLDEAARTIEELLREVEERARRVLRHSEKVLDKVRKENEDSLRHSDEVLRRVEREAEKKG

SEQ ID NO: 19622 - protein, 59 aa, Artificial Sequence
  Synthetic
EEVIEKTLRDVERRLRDLEDKLRKLNEEVEKTIRDLRRSSEALNKKVKDLIKKLLDEVK

SEQ ID NO: 19623 - protein, 60 aa, Artificial Sequence
  Synthetic
TLDEVAKEIEELLRRVEEENRKSLEHSERVLDEVRERNERSARHSEEVLRRLREEVRRKG

SEQ ID NO: 19624 - protein, 59 aa, Artificial Sequence
  Synthetic
EKVIKETLDRVRETIKRLIKSSRDLNEEVKRRIRELIESSRKKNEDVKKTIEELLRRVK

SEQ ID NO: 19625 - protein, 60 aa, Artificial Sequence
  Synthetic
TADEVLKEIEDVHRRVNTENRKSIEHSKKVLEEVRRTNEKSIEDIERLLREVEKRIRDKG

SEQ ID NO: 19626 - protein, 59 aa, Artificial Sequence
  Synthetic
EDVLRKALEENERLIRELEESSRRLNERVKELIRELEKSSKRLLDEVKKLIDELREEVR

SEQ ID NO: 19627 - protein, 60 aa, Artificial Sequence
  Synthetic
TLEEVVEEIRRRHEEVNRRNRESVENSREVLERVEEDNKDSLRRIRELLERVARKLDERG

SEQ ID NO: 19628 - protein, 59 aa, Artificial Sequence
  Synthetic
EDAIRDMLRRNEERLRRLIESSEKLNRESRDVIRKLIESSRDLLRKVKETIEKLEEEVR

SEQ ID NO: 19629 - protein, 60 aa, Artificial Sequence
  Synthetic
TLEEVVRDIERVHEEVNESLKRVNETTTDMHRRLNEEAKRVLEEIEKLLKDVEKKIRDKG

SEQ ID NO: 19630 - protein, 59 aa, Artificial Sequence
  Synthetic
EDAVKRELDRNREEIKKLEKRIRDVLKKNKDLIDKVREELKRLLDEVKKRIDKLAEEVK

SEQ ID NO: 19631 - protein, 59 aa, Artificial Sequence
  Synthetic
SLDEAAKEIEELLRRSHEELKRVVKEIRDLLRRSHEELRRALEEIERLLDEVRRKLEER

SEQ ID NO: 19632 - protein, 59 aa, Artificial Sequence
  Synthetic
DETVKELLRRVRKLVRESIEEVKTLLREAEEKVRRNERKVEEILRRVRETIRRLEERIK

SEQ ID NO: 19633 - protein, 59 aa, Artificial Sequence
  Synthetic
SLDEALERIRRMLKRSHDENRRVAEDIKRLLEESHRENERVVKEIRDVLDKLREDAERN

SEQ ID NO: 19634 - protein, 59 aa, Artificial Sequence
  Synthetic
DEDVKRLLDDVRRTVEENIRRSETELRDVKRRVTETIRESERLLEEVKRIIDKLREEAK

SEQ ID NO: 19635 - protein, 59 aa, Artificial Sequence
  Synthetic
GLDEVLKEIRELLKESHDRLRRVLEEIEKLLEDSHRRNEEVVRRIRKVLEEVREKAERD

SEQ ID NO: 19636 - protein, 59 aa, Artificial Sequence
  Synthetic
ERLVKELLDRARDKIRRNIEELERKLRAVEEKVRRTIRESEELLDRVRKIIEDLEREAT

SEQ ID NO: 19637 - protein, 59 aa, Artificial Sequence
  Synthetic
DLDEALKEIERLLEEVERRNKEVLERIRRLLKRSHEELKRVLEEIEKLLRDLKKRVDDG

SEQ ID NO: 19638 - protein, 59 aa, Artificial Sequence
  Synthetic
RDSVRDLLRRAKERLDELIKTSKELLDRARKKVKENEEELRELLKDVRRIIKKLTEEVR

SEQ ID NO: 19639 - protein, 60 aa, Artificial Sequence
  Synthetic
SELEDLLREVKELIDRLIDDSRRLVKTAEELIREAIKRSEDLLEEVKRLIDRVTEMVERG

SEQ ID NO: 19640 - protein, 59 aa, Artificial Sequence
  Synthetic
ERVREVLERIKRLLEELKKRDEDSVREIERLLEELKRRNDRVVDEIRKLLKELAERVKK

SEQ ID NO: 19641 - protein, 59 aa, Artificial Sequence
  Synthetic
DLDEVIRELEKLLKESHEAVKRVIKKSEDLLRDSHKKVKDVIRRSEDLLRKLEEEVRKN

SEQ ID NO: 19642 - protein, 59 aa, Artificial Sequence
  Synthetic
RTLLEELRRRIEELLKENRELLKRHEDKSKKLLEDNERLLREHAKKSDEIRRELRERVR

SEQ ID NO: 19643 - protein, 59 aa, Artificial Sequence
  Synthetic
DEVERAKDVLDELRRRVEEELRRWKETSERLREESERALEKSEARLREAAEKLERVKRN

SEQ ID NO: 19644 - protein, 56 aa, Artificial Sequence
  Synthetic
EEVLRDIREKLRELAERLKRLLDDDKRVLDEVRKANEDLLRKIKEDIEELRKELEK

SEQ ID NO: 19645 - protein, 60 aa, Artificial Sequence
  Synthetic
DEDEEVKRTIEELRKEVEKTLREIEKSLKESEDKSRKHLEEVKKSLKETEEEVDELKKRN

SEQ ID NO: 19646 - protein, 56 aa, Artificial Sequence
  Synthetic
EKVLRELEERVRRLKKELKRVLDDYKRKLEEAERRNRKVLKEYEDSLRELADRLRR

SEQ ID NO: 19647 - protein, 59 aa, Artificial Sequence
  Synthetic
DEDREVRKTIEKLKRDSERHLEEMKRSAEESRKEVDKLLKKIKDSLRRTEERVRRLKKN

SEQ ID NO: 19648 - protein, 56 aa, Artificial Sequence
  Synthetic
EEVLRELRKIVEELRKRNEDVLEEYERILRELKERLDRVLKEYEDRLRELEKELRD

SEQ ID NO: 19649 - protein, 59 aa, Artificial Sequence
  Synthetic
SEAEKAKETIDRLADRVRKLLEEIKRSLDDSRRKSKETVEENEKTLDRMRKEVDAAKER

SEQ ID NO: 19650 - protein, 56 aa, Artificial Sequence
  Synthetic
EEVLRTLEEIIRRLTKELEDVLREYERELRRLEEENKRVIDKTEEEIRRLADRLRR

SEQ ID NO: 19651 - protein, 59 aa, Artificial Sequence
  Synthetic
EEDERADETLKRIKRESDETVKKNERTITELLKRVKRLVDEIRKSLEETARRVDSAKKR

SEQ ID NO: 19652 - protein, 56 aa, Artificial Sequence
  Synthetic
EEVLRKFRKILEEAAELNKEVIDRSRKIIEDASRLLREVLEDYETKLRELKDKLDT

SEQ ID NO: 19653 - protein, 56 aa, Artificial Sequence
  Synthetic
SLKEVIDDLERIIRELEKRNREVIKRVRKIVREAEEKNEDVIRKLKETIERLEREL

SEQ ID NO: 19654 - protein, 56 aa, Artificial Sequence
  Synthetic
SRELRDEIRKIKKKNDEHLKRLEDELRKLLEKSDRHVKELEDRIRKAAKEVKDAKD

SEQ ID NO: 19655 - protein, 56 aa, Artificial Sequence
  Synthetic
SLEDVIRDLARIIEEAERRNKTVLDELRKTIKELVEENEKVLDEDDKKSRELEKRL

SEQ ID NO: 19656 - protein, 56 aa, Artificial Sequence
  Synthetic
SRRLREEIKRLLRESEKHVEDLRREIERIKRENEEHLKKWRRDSERLEKEVEDAKR

SEQ ID NO: 19657 - protein, 56 aa, Artificial Sequence
  Synthetic
DELEKLRDDARRIEEKHRRTVEKDKDVVRRMDKEVKDHVRRLKELAKKLEDDVRKR

SEQ ID NO: 19658 - protein, 60 aa, Artificial Sequence
  Synthetic
KRSVDEVLREITEIVERVMELNDKSVEETRRIVERLKEEIDTVNDEIAKIVRKVIEEIKR

SEQ ID NO: 19659 - protein, 56 aa, Artificial Sequence
  Synthetic
DELERLKEAAKRLADEVKEHVDRSRENAKRLKEEVEEHVKRLEDVARTMDEEVKRR

SEQ ID NO: 19660 - protein, 60 aa, Artificial Sequence
  Synthetic
KESVDRVLKEIEDIVRRLEERLDESNKELKEIVDDVTEKLERVNRKIAEIVKRLSDEIRK

SEQ ID NO: 19661 - protein, 56 aa, Artificial Sequence
  Synthetic
DELEELRRAAEEMEKEVREHVKRSEKNAKDLEKEVREHVKKLREVLRRLTEKVKRR

SEQ ID NO: 19662 - protein, 60 aa, Artificial Sequence
  Synthetic
KEKVDRVLEEITREVERLKKELDESNERLERIVRKVIEELRKVDEDAEERVRRLEEEIRR

SEQ ID NO: 19663 - protein, 56 aa, Artificial Sequence
  Synthetic
DDLDRLREAAERMAREVEDHVRKLKDLIRRVRERVERHVKKLEDDLKRVKEEVDRR

SEQ ID NO: 19664 - protein, 60 aa, Artificial Sequence
  Synthetic
KDKVRKVLEDIKRIVDRLEERIREVDKDLERIVRELMKRLDEVNKRLEDTVRRLSEEIRR

SEQ ID NO: 19665 - protein, 60 aa, Artificial Sequence
  Synthetic
DLIEEIKKLAEDHHRRVKEVLDRNREVAERLKKRVRRIVEENKRLAEDVTRKIKELKRRV

SEQ ID NO: 19666 - protein, 59 aa, Artificial Sequence
  Synthetic
EDLRRVLEELREIVTRNEKEIRDTIRELEEIVKRLKEDNDRSVRELERILEELREELER

SEQ ID NO: 19667 - protein, 57 aa, Artificial Sequence
  Synthetic
DSDEEVRRVLEKVEEDVRRLAKDIRDSVRRSEERIDELVKKLEKSIDESRRRVETTA

SEQ ID NO: 19668 - protein, 55 aa, Artificial Sequence
  Synthetic
ERLLEEIEKVVEDLRRKAEELIEKNERLLRRLEEVAKELDKRNKELLEELIRRNE

SEQ ID NO: 19669 - protein, 57 aa, Artificial Sequence
  Synthetic
SEADKVREVLKRVKEEIDRLVEEIEKVNRDSRREVEKLVEKLRKSLKESKDRIARDL

SEQ ID NO: 19670 - protein, 55 aa, Artificial Sequence
  Synthetic
EELLRKIEEVLRRLTEDAKRLIRRNREILKELRELAKRLDEENKELLDELIKKAR

SEQ ID NO: 19671 - protein, 57 aa, Artificial Sequence
  Synthetic
SMIEKVREVLKEVADRVRRLLEENKKSIDDSARALEELIKRIRESLRKSEEDLKREV

SEQ ID NO: 19672 - protein, 59 aa, Artificial Sequence
  Synthetic
SEFVKRILDEVDEILKRLERRVKEHSRKNREELEKIRKEAEEILRENEELLEKIVRDAR

SEQ ID NO: 19673 - protein, 57 aa, Artificial Sequence
  Synthetic
EMVERLEESIDRSRKELDRLIEENKKVLEEVEERVRRLIEKLKRSIEESEERLRRKV

SEQ ID NO: 19674 - protein, 59 aa, Artificial Sequence
  Synthetic
DEVVRRLNEENKKLLEDIRRRAKDHSRRVREILEDLEREVEKMNEENKDLLERIVRRAK

SEQ ID NO: 19675 - protein, 57 aa, Artificial Sequence
  Synthetic
SMIEALKENIRRSEEEIRRLIEEWRKVSEDIEREVKKLIKELEESIDESAKRLREKV

SEQ ID NO: 19676 - protein, 59 aa, Artificial Sequence
  Synthetic
SDFVRKLLEENNELLKEIKKRVEKVLEESKELLKELREKIRRLNEKNKKLLEEIVRRAK

SEQ ID NO: 19677 - protein, 56 aa, Artificial Sequence
  Synthetic
SEIEKVVKDLRERLKELRESVKRLDDKNRELLERLEREVEEMDRRNEKLLRDLKRQ

SEQ ID NO: 19678 - protein, 59 aa, Artificial Sequence
  Synthetic
EELLRTLEKVLREIAEELERLNRKVRESIRESARRLKRLIEKLERSIRRSAEELRKRAK

SEQ ID NO: 19679 - protein, 56 aa, Artificial Sequence
  Synthetic
DEIDKIVKKLRDILREIEKRAKEVNKRNKELLDELRERVKDLDRTNEELLRELKDS

SEQ ID NO: 19680 - protein, 59 aa, Artificial Sequence
  Synthetic
DKLLKKLKDVLDEIAERIKELIRELRESIKKSAEELKRLIDRVRRSIEESAKRLEDRAR

SEQ ID NO: 19681 - protein, 56 aa, Artificial Sequence
  Synthetic
SELEKILEKLRRIVEELAKSVRKLNEENKELLKRLADSVKKLDDDNKRLLTDLRRR

SEQ ID NO: 19682 - protein, 59 aa, Artificial Sequence
  Synthetic
EELLRTLEDVLRKIAEDLERMNRELKRSIKKSADDLKRLNEKVKRSIERSAEELRKRRT

SEQ ID NO: 19683 - protein, 56 aa, Artificial Sequence
  Synthetic
DEIKKIVEEIKKTLEEIDKSVRELIRRAREILRELEESVRELIRRNSKLLEDLRRQ

SEQ ID NO: 19684 - protein, 59 aa, Artificial Sequence
  Synthetic
DELLKELEDVLKEVAEEIKRLNERLKKVLEEIERTLRELNRRLEENIRRSARALEETRR

SEQ ID NO: 19685 - protein, 56 aa, Artificial Sequence
  Synthetic
SEVEDLLRRIEKILEDLRRSVEELLKRIEDALRRLEEEIRKVTEESKRLLEDLTRR

SEQ ID NO: 19686 - protein, 59 aa, Artificial Sequence
  Synthetic
RELIEEVEKVVKRVEEALKRLNDRVRETLDEVRKRLEDAIRRWREESERIARELEKRTT

SEQ ID NO: 19687 - protein, 56 aa, Artificial Sequence
  Synthetic
SEADEIVRRIEELLKELEREIRKVIRDSERLLKELEDSVRELLKKIRDVLDELTKS

SEQ ID NO: 19688 - protein, 59 aa, Artificial Sequence
  Synthetic
EELLRKLEAVLDKVKKDLKKMIDDWRRVSERIARELEKLNRRVKEELDRVKEALDERTR

SEQ ID NO: 19689 - protein, 57 aa, Artificial Sequence
  Synthetic
SEIDEVVERIKRTLEEAEKRVKKASEDHKRRLDELRKKVEKLIEDNERTLEAVARRK

SEQ ID NO: 19690 - protein, 59 aa, Artificial Sequence
  Synthetic
ERLLRKLRKVVKDVDDRLKELLEENRDVVRRIKEELEKLLEKVRRSIEESRRRMRETRR

SEQ ID NO: 19691 - protein, 57 aa, Artificial Sequence
  Synthetic
SEVDEVLKDIRRILEEARKRVEELDRENKRILDEVREKVKELNERNKEILRAAEERK

SEQ ID NO: 19692 - protein, 59 aa, Artificial Sequence
  Synthetic
EKLLRDAKRVVEEVSKALKDLLKEVEDSVRRSKREMEKLLEELRESVKRSEEELRRTSK

SEQ ID NO: 19693 - protein, 60 aa, Artificial Sequence
  Synthetic
DEVEDLLRRNEELLKRLLEEIKKLTDEHREELKRLAEDVKKVVEDVRRLLKELEEMVRRG

SEQ ID NO: 19694 - protein, 59 aa, Artificial Sequence
  Synthetic
EKLVRKLEESVRRSTEELEKALKRNNDVIRRIAEALDDLLRRLEKVIREIEKKLRDDTR

SEQ ID NO: 19695 - protein, 60 aa, Artificial Sequence
  Synthetic
DRVEEAVKDIERLLRELKRDVERLVRENEKILKDAKREVDELTKDHRRKVEELDEMVKRG

SEQ ID NO: 19696 - protein, 59 aa, Artificial Sequence
  Synthetic
EDLLRKLEKVVRDVEKKLRKLLEDLKRSIDRSTRELEKLNEKNNEVIRDIERRLDEAET

SEQ ID NO: 19697 - protein, 56 aa, Artificial Sequence
  Synthetic
SEIEKLIEEIRRVVKEIKREVERAIRENEKLLRESKRRNDELIKEIERVVEELKKR

SEQ ID NO: 19698 - protein, 58 aa, Artificial Sequence
  Synthetic
RLIEELEKVLRDVEKVARDVLRKLRRSIEESRRRSEELNKTVKKVLEDVARTATERSR

SEQ ID NO: 19699 - protein, 57 aa, Artificial Sequence
  Synthetic
REIEEAIKDVERVLRESEERNRRLIERIKRMLKKSEDENRKFIEDNKRLADDLRRRN

SEQ ID NO: 19700 - protein, 58 aa, Artificial Sequence
  Synthetic
EDVERLRKVIEEVKRRMKELNERLKEELREVAKRSRDLNKELRESIEESADRARRRRK

SEQ ID NO: 19701 - protein, 57 aa, Artificial Sequence
  Synthetic
DEIERLREDIKRVLEESTRRNKKLLDEIRKALDESRRKNEEAIRRNEEVVRDLKDRK

SEQ ID NO: 19702 - protein, 58 aa, Artificial Sequence
  Synthetic
DKVRTLRRELEEVARALEELNRRVEEELDEVRKESERLNKELEDSIRKSAEDAKRTTK

SEQ ID NO: 19703 - protein, 60 aa, Artificial Sequence
  Synthetic
DEKDKAIEDVRDLLRRNEEVARRMDKRLKDLLDTIRKKAEDLDRELKRLLEEAERLVREG

SEQ ID NO: 19704 - protein, 55 aa, Artificial Sequence
  Synthetic
KELEKVLEEIRRRSEELLKHHAEVIERIERDVERLRRHHEDTIRKIKEKVDRDRK

SEQ ID NO: 19705 - protein, 60 aa, Artificial Sequence
  Synthetic
DEDREAIKEVEKLLRDNERVARRLDEEVKELLDEMRRRSEEMDRELERLLEEAKRLADKG

SEQ ID NO: 19706 - protein, 55 aa, Artificial Sequence
  Synthetic
EELKEVLREVDKRSKELLKHHKRRIEEVRKRVRELNKHHEDVIRKIKKKVREDRK

SEQ ID NO: 19707 - protein, 60 aa, Artificial Sequence
  Synthetic
KEAEEAIKRVEDLLRRNKEVAERIIREIRRLLREADETSKRMDEDLRRLLREAEDLVRRG

SEQ ID NO: 19708 - protein, 55 aa, Artificial Sequence
  Synthetic
RELDKVLERVKRESDRLLKEIEKVVREVEERLRRLNEHHEKVIREIEKKLEDDRR

SEQ ID NO: 19709 - protein, 60 aa, Artificial Sequence
  Synthetic
DEDREAIERVRRLLDENRKVVEELDERLKELLRDAEEKSRRVIKTLRELLKEIEDLARRG

SEQ ID NO: 19710 - protein, 55 aa, Artificial Sequence
  Synthetic
DELRKVLEDVERASKELLDHHRDVIRRIEEELKRLNKELEKVIREIERAVEELER

SEQ ID NO: 19711 - protein, 60 aa, Artificial Sequence
  Synthetic
DEDRDAIRKVEDLLRRIEEIVRRLIEEVKRLLEDNRRKSKRFIERVDELLKEMEKLVREG

SEQ ID NO: 19712 - protein, 55 aa, Artificial Sequence
  Synthetic
KELEELLRRVEREVEKLLTDLRRLLREVKETSKRLNEELKRRADEVEKKADEDRK

SEQ ID NO: 19713 - protein, 61 aa, Artificial Sequence
  Synthetic
SSKDRIRKVLEEVRETLDRLAKRIEKSLRDSAKRVEDLAEENRTSLKETKERIDELIKRRK

SEQ ID NO: 19714 - protein, 55 aa, Artificial Sequence
  Synthetic
EELIRRIEEELKRIEDTVEKIIRKDEKLLEDIERESERHIREDKELLKELEKEER

SEQ ID NO: 19715 - protein, 61 aa, Artificial Sequence
  Synthetic
SSDKEIEDVLRKVKDELDKLARALDESLKRSEKDIDRLEEELKESHDRTREEIRKLIEERN

SEQ ID NO: 19716 - protein, 55 aa, Artificial Sequence
  Synthetic
DELIREIKKVLDRIREEIERLLREDEELLERLREDAKRILDKNKELLDELRRRVK

SEQ ID NO: 19717 - protein, 56 aa, Artificial Sequence
  Synthetic
SADRKLEEVLKKVEDDIRDLERRLKRSLDESKREVERLERENRRVLEEVEKKVRAD

SEQ ID NO: 19718 - protein, 59 aa, Artificial Sequence
  Synthetic
EETVKRIIEKIERILRKLKRDAERILDKDRKLLKKLEEESRKHIEDVKRLLEELERRTR

SEQ ID NO: 19719 - protein, 56 aa, Artificial Sequence
  Synthetic
ELEEKLKRSLEDSRRRVEELRRTNEEVLREVEEEIRRLIKENEDSLRESKKRVDDR

SEQ ID NO: 19720 - protein, 59 aa, Artificial Sequence
  Synthetic
KETVDKILEDDKELLRRLEEESKRHIDEVRKILEDLERRSRRHIEEDKKLITELEKETK

SEQ ID NO: 19721 - protein, 56 aa, Artificial Sequence
  Synthetic
DLDERLRRSLKRSKEEVERLRKENEEVLRRSKETTKELIKTNEKVLEDVERLVRES

SEQ ID NO: 19722 - protein, 59 aa, Artificial Sequence
  Synthetic
RETVEKIIKEDEDLLRKLKEESDRHIKDVERVARENERESKRHIEEVRKVLDELREETR

SEQ ID NO: 19723 - protein, 56 aa, Artificial Sequence
  Synthetic
SAEEKLEEVLKRVAERIEELIRRNRRVLDRVREEIKRLVEENRKSLDESERRVRER

SEQ ID NO: 19724 - protein, 59 aa, Artificial Sequence
  Synthetic
EETIERIIKKIEDILRKLEEESERHIRRVEEELKEMEKRSREHIEEDKRLLEELERRTK

SEQ ID NO: 19725 - protein, 56 aa, Artificial Sequence
  Synthetic
SAEDELRKVLEKVREDIDRLADENRKVLKRSKDETKRLIKENREVLERVEEIIRRD

SEQ ID NO: 19726 - protein, 59 aa, Artificial Sequence
  Synthetic
EEAIERIIRRIREILERLRKKSEEHIRRVEDVARRNEEESREHIKTVEKILEELKRKAD

SEQ ID NO: 19727 - protein, 56 aa, Artificial Sequence
  Synthetic
SEVEELIKRLKKVLKELVDKVRKVIEDTKELLERLKRRSEDHIRKLREVLKEAKDQ

SEQ ID NO: 19728 - protein, 59 aa, Artificial Sequence
  Synthetic
EELDRRIEKVLKEIEEKIREVIKEWERVHREVNELLKRLIDENRKVLDEIRKLLEEKSK

SEQ ID NO: 19729 - protein, 56 aa, Artificial Sequence
  Synthetic
SEAEDLIRRLKEVLDELKKKADDLIRDTKRLLDEIRKKSEDHIKRDKELLKDLKRR

SEQ ID NO: 19730 - protein, 59 aa, Artificial Sequence
  Synthetic
DRALREIEKVLKEIKELIEKVIRDWKRVHDEVNEELRRLIEKNRKSLKETADELDRKRK

SEQ ID NO: 19731 - protein, 56 aa, Artificial Sequence
  Synthetic
SEVEKLIKEDKELLERLKRDVERLIEELRRTLKELKKESEKHIEDDKRLLDDLRDR

SEQ ID NO: 19732 - protein, 59 aa, Artificial Sequence
  Synthetic
DKLITDIRRSLDETRRRIEKLIREIEKVLREIEETLRELEKRNRESLERTRETLERKSK

SEQ ID NO: 19733 - protein, 60 aa, Artificial Sequence
  Synthetic
SEVDELIERDKKLLRDVERDVRRLNKEVRDILDEIRKDVEDALKENKELLDRLREMVKRG

SEQ ID NO: 19734 - protein, 59 aa, Artificial Sequence
  Synthetic
REVLKRLEDSSKDTTDKLRELLRSHKKVIDEVREKLKELLDRYRKVSDEIREEIDRARK

SEQ ID NO: 19735 - protein, 60 aa, Artificial Sequence
  Synthetic
SEVEKLIEDDRKLLEDAEEEVRRNNREIERILDKAREDVKRIIKEIEDLLREADEAAKRG

SEQ ID NO: 19736 - protein, 59 aa, Artificial Sequence
  Synthetic
EEAKRRIKKSIDDSRRELKRLLESNRKVIEEVKKTLEELIRTLEEVVRRVEDRLKKLAD

SEQ ID NO: 19737 - protein, 61 aa, Artificial Sequence
  Synthetic
DSVEELLKRLRDLLEESKRRAERLIREIERLLRESEKRVRELNRRLEELLREAEDRVRKEG

SEQ ID NO: 19738 - protein, 59 aa, Artificial Sequence
  Synthetic
EDALRKLEKVIREIEREHRRLLEEIRRVLKEVDKRHDEVRKSHEDVIRRIEERLERLKK

SEQ ID NO: 19739 - protein, 61 aa, Artificial Sequence
  Synthetic
DSVERLIEEIRRLLKRSEEIARKLIRDAEKLLEEHRRRVEELNREIERKLEELDEKARRRG

SEQ ID NO: 19740 - protein, 59 aa, Artificial Sequence
  Synthetic
REALEKIRKVIKEVKDTHRDLLRRVRDVIRRIREASKETERSHREVIERVRKRLDELTK

SEQ ID NO: 19741 - protein, 61 aa, Artificial Sequence
  Synthetic
KSVDDIIREIRKLLEDHKRRVDELLERLKKLLEDHRRTVDKLIKDLERLLEELARRVKREG

SEQ ID NO: 19742 - protein, 59 aa, Artificial Sequence
  Synthetic
REALERIREEVRRVEEASERTLRELEKVVRRIERESEKLKRELEKVVEDAKRTLEKLIE

SEQ ID NO: 19743 - protein, 61 aa, Artificial Sequence
  Synthetic
SSIEKLLEELKELAKRHEDEVKKLIRELEDLARKHKERSEKLNEEIKKLLKELADRVRERG

SEQ ID NO: 19744 - protein, 59 aa, Artificial Sequence
  Synthetic
ERVRRRLRKVVEEIKERSDRTIREMEKVIREIKEESRRLNKSHEEVIRDVKRRADELRK

SEQ ID NO: 19745 - protein, 61 aa, Artificial Sequence
  Synthetic
SEVEDLLRDLERLLEEHRERVERLIKRLRELLERHKRTVEKLNRDVKEKLRKLKKEAEDKG

SEQ ID NO: 19746 - protein, 59 aa, Artificial Sequence
  Synthetic
EEALRRLKRVVEEIKRRSDRLIEKAEEVIRDIEEKSEETLKSHREVLERVKKILTDLRK

SEQ ID NO: 19747 - protein, 61 aa, Artificial Sequence
  Synthetic
DEIDRLLEDLRRLLEEAERRVTEIIKRIKKLLEEHERRVRELNKDLRRLLEEAEDVVRRKG

SEQ ID NO: 19748 - protein, 59 aa, Artificial Sequence
  Synthetic
EKARRDLERVVTEIDRELKRLEEDIRRVLEEVKRRSEDLRRSHRRVIEDIKRRLEELRR

SEQ ID NO: 19749 - protein, 61 aa, Artificial Sequence
  Synthetic
KEVEDIIREIRKLLEDHERKVKELIDEIRRLLEEHERTVRDLNRRIKKLLEEAKEFADRKG

SEQ ID NO: 19750 - protein, 59 aa, Artificial Sequence
  Synthetic
KEMIDRVRKVVEEVKKRSRETLERIRKVIEEVKARSKELIESHEEVIKRVEETLKRLKD

SEQ ID NO: 19751 - protein, 56 aa, Artificial Sequence
  Synthetic
SLEEEIKKLLKEVRDVNDRLKETIEDLAEKIERLAKRMIERIEEILREVDRLVKEV

SEQ ID NO: 19752 - protein, 59 aa, Artificial Sequence
  Synthetic
EDVIREILKEIRKHLRDSEEENKKTLDTLRKILEDLTKAAEDILEEIRRELDRLRKEAT

SEQ ID NO: 19753 - protein, 60 aa, Artificial Sequence
  Synthetic
SELEDILRRLREEVKRLREESRKLLEDNRRLVEEVKRESDKVLKRLKDKADRLKELAERG

SEQ ID NO: 19754 - protein, 55 aa, Artificial Sequence
  Synthetic
REIKTVIDELTRELERLNREHEDLTRKLREELKKLNKRIKDLIDTLKKLLEDLKK

SEQ ID NO: 19755 - protein, 56 aa, Artificial Sequence
  Synthetic
SEEEKLRELVKEVEKRTRELNENLRRSIEEVERDTEELDKNLEKSIREVKKVLDDL

SEQ ID NO: 19756 - protein, 56 aa, Artificial Sequence
  Synthetic
AEDVLRRIRELLERNEEVNRRLDEASKRLLEENRRKNKKLDDDSKELLKRLTERAK

SEQ ID NO: 19757 - protein, 56 aa, Artificial Sequence
  Synthetic
REKERLEKVIRELETKARELNKNLKKSIDDVRRETERLNENLKRSVDELRKRLKDL

SEQ ID NO: 19758 - protein, 56 aa, Artificial Sequence
  Synthetic
AEEVLKELRKLVEELERRNRELDKRSKDLLRENRELNKDLDRKSRELMERVERKTR

SEQ ID NO: 19759 - protein, 56 aa, Artificial Sequence
  Synthetic
SEEEKLERLIEDLERKLKELNDNLKESIDRVRKRTEELNRNLRESIKRVKEELERQ

SEQ ID NO: 19760 - protein, 56 aa, Artificial Sequence
  Synthetic
AEEVLRELEKLVEDLERENRRLDKESKDLLEENKKVNKDLDDESKRLLEEVSKEAK

SEQ ID NO: 19761 - protein, 61 aa, Artificial Sequence
  Synthetic
SDKEDVTRLLEEVSRASERSRKRWKDSSDEVKRTSEESIRRLRELLERLRERIERVIREKK

SEQ ID NO: 19762 - protein, 56 aa, Artificial Sequence
  Synthetic
VDELRKKIEEIVKRDEDLVRRLLEDSKRLAEEDRRLLEEVKREIDEIRKRIDEEVK

SEQ ID NO: 19763 - protein, 61 aa, Artificial Sequence
  Synthetic
DEIDELVRRIEELAERHHRRVDEIVKRNEEVLKELDERARRLVRENEEVLKRLEETVRREG

SEQ ID NO: 19764 - protein, 59 aa, Artificial Sequence
  Synthetic
ERAEKRLRDVLEKLRRDVERNREEIKKSAEDVRREVKRVTDELKESIERVRKRVKELKD

SEQ ID NO: 19765 - protein, 59 aa, Artificial Sequence
  Synthetic
EAERKVKTVVDELRRIVDELAKELEESLKRTDETIKRLARELERVDRELEEIIKELERK

SEQ ID NO: 19766 - protein, 55 aa, Artificial Sequence
  Synthetic
DEVVRKVEEEAERIKKRIKDLVRRDEKLVEDMRRRIKRLVEKNRKVAEKMRTDTD

SEQ ID NO: 19767 - protein, 60 aa, Artificial Sequence
  Synthetic
DLEELLRKVLEELRKIVEDARRENEKSLRESEKIVREVEELNKKVLEEVEKKIREVIEEK

SEQ ID NO: 19768 - protein, 59 aa, Artificial Sequence
  Synthetic
EETIKRIVDEIRKEAERLLRRHRKSVKEDKDLAKKIREDHKKSVEDIERTLEELEKRAK

SEQ ID NO: 19769 - protein, 56 aa, Artificial Sequence
  Synthetic
SEIEELVKEIKKVADEVRRRHEKSVREIERKLEELDKKVKDLVDEDKKLADELRRR

SEQ ID NO: 19770 - protein, 59 aa, Artificial Sequence
  Synthetic
DRVRRELERVLRDVERIIRDVKRTNKRVDDDVERRIRELRKELEDSLRRSKRIVDEVRR

SEQ ID NO: 19771 - protein, 57 aa, Artificial Sequence
  Synthetic
SEIERLVEEIEKLLRKMAEEHKRSVERDERLARKLKRENEEHIKTDEELVDRLRRRN

SEQ ID NO: 19772 - protein, 59 aa, Artificial Sequence
  Synthetic
DRVLRELKRVLDEVKKIIEDVAKENEDSDRRSKKIIEDVVRENKESLDRSREEIERVRK

SEQ ID NO: 19773 - protein, 56 aa, Artificial Sequence
  Synthetic
KEIEELVKRIEDEARRLKEEHKKSVREIEELLKRLTEEVRKLVERDKKLAEDLKDR

SEQ ID NO: 19774 - protein, 59 aa, Artificial Sequence
  Synthetic
DEMLRLLEKVLRDWEEIVRRVKEANDDVNRRVEETLRDLKRKLDRSLEDSERIIREVAT

SEQ ID NO: 19775 - protein, 59 aa, Artificial Sequence
  Synthetic
SVEDELRKVIKENEDVLREVEERVETVIKRNREVIEEVAREVERVIEETRRLLKEIEKA

SEQ ID NO: 19776 - protein, 59 aa, Artificial Sequence
  Synthetic
EESIKRLLEKIRKHSEEVKETIRRLLEKIEEHTERVKREIDKMLRSNEDLMRRIKEEAE

SEQ ID NO: 19777 - protein, 59 aa, Artificial Sequence
  Synthetic
SIKEKLDEAIERNERVLRRVEEEVRKSNEKNKEVLRRVSEEVRKVIEELEDLLRKIAEK

SEQ ID NO: 19778 - protein, 59 aa, Artificial Sequence
  Synthetic
DETAERLLRKIEKHSREVDETIRRMLEEDERHIKEVEDTIREMLERLKRLIDEAEKDAK

SEQ ID NO: 19779 - protein, 60 aa, Artificial Sequence
  Synthetic
DEVREVLKKIRELIKTNREHVTRLLRTIEELSRRSEEMIRRILEEIEKLIKDVRRLTEEG

SEQ ID NO: 19780 - protein, 59 aa, Artificial Sequence
  Synthetic
EEMEKLLEEAIKEAREDSRRSDREVEEVLRKHKKVNDRVREEIERVLRKLEELLKKDRT

SEQ ID NO: 19781 - protein, 59 aa, Artificial Sequence
  Synthetic
SEVDEIVRRLEELIRRNTEKVERLLERHERLIRELKERVKELLRKHEELAKEITELTKR

SEQ ID NO: 19782 - protein, 59 aa, Artificial Sequence
  Synthetic
KEARDRIRKVLEELKKKNKELEERIRKVSKELEKVLEDVKRESEKVSKELRERLERSKT

SEQ ID NO: 19783 - protein, 59 aa, Artificial Sequence
  Synthetic
SELERLEKEARDIVENLKRVLEELAKDVKRLLKESDELLKDLREKVREILERIEELARR

SEQ ID NO: 19784 - protein, 59 aa, Artificial Sequence
  Synthetic
ETAKRELERLVKELRDVHREVEKRLKELAKELREVNKRIKDDLDRLVEALEEVLDRVRR

SEQ ID NO: 19785 - protein, 59 aa, Artificial Sequence
  Synthetic
SELEELKRRIDELLKENEEILRELEERVRRLNKENRDLLRKLEEEAKRLVEEVRRVAEE

SEQ ID NO: 19786 - protein, 58 aa, Artificial Sequence
  Synthetic
EVKERIEKVLKDLERRNRESEKEVRRLLKELKESIDDSRRRVDELVKRLRKVLEDIRR

SEQ ID NO: 19787 - protein, 61 aa, Artificial Sequence
  Synthetic
SAEETLEKLIRDLEKSIRKSAEDLERLIRELEKSVRDSAKLLRDLIREVRDVVRDVVRAKG

SEQ ID NO: 19788 - protein, 55 aa, Artificial Sequence
  Synthetic
KDVAERVKELDKRNKDLLKRLEEEVRRLIKENERLLRELAKEVKELLERIKRAAG

SEQ ID NO: 19789 - protein, 61 aa, Artificial Sequence
  Synthetic
SAEDKLRELEKKLRKSIKESADRLRKLNEELRRSVRESAERLKELIREVEEVLRDVVRKRG

SEQ ID NO: 19790 - protein, 55 aa, Artificial Sequence
  Synthetic
EEVEDEVRRLDEENKKLLEDLKRSVDELIERNKRLLEELTKRVKELLDKIRKTAE

SEQ ID NO: 19791 - protein, 61 aa, Artificial Sequence
  Synthetic
SMEDSLRELIRKLRESVKRSAEELRRLNKRVEDSIRDSARKLRELIRRVEEVVKEVVETRG

SEQ ID NO: 19792 - protein, 55 aa, Artificial Sequence
  Synthetic
ERVEDDVRRIDDENRRLLEELKKSVDELDKRNEELLRRAEKEVRDLLREIREAMR

SEQ ID NO: 19793 - protein, 60 aa, Artificial Sequence
  Synthetic
DAEEELERLLRESERVSRDSARRLRELLKKLRRSVERSRREIDRLLKELEDVIREVIKRK

SEQ ID NO: 19794 - protein, 55 aa, Artificial Sequence
  Synthetic
KDLAREVEKVVKEDEDILRRAEEEVERLIETNRDLLRKVEREVKELVEKVEEDER

SEQ ID NO: 19795 - protein, 59 aa, Artificial Sequence
  Synthetic
SELEELKREVDELTEEHKELLKRLTERVKELSERHKELLERLRERSERLVRRIRELAKR

SEQ ID NO: 19796 - protein, 59 aa, Artificial Sequence
  Synthetic
DEVLRKAEELLRRNNRVIEEIEKRLRELLKENNDVIKEIRERLEKSNKELRDVAREVAK

SEQ ID NO: 19797 - protein, 59 aa, Artificial Sequence
  Synthetic
SELEELKKKVDDSIRENERLLRELTEDVKRLSKEHKDLLKRLEDKVEELIRRARELAKR

SEQ ID NO: 19798 - protein, 59 aa, Artificial Sequence
  Synthetic
DDMLEKAKKVHDEHRKSVEESTERLKELLRRNNEVIKDIARRLDELLRKLEKVVKEIAK

SEQ ID NO: 19799 - protein, 59 aa, Artificial Sequence
  Synthetic
DELRELEEEVRKSIETNRELLERARERVERLSEEHRKLLEKVKEDSDRLVEEVKDLERR

SEQ ID NO: 19800 - protein, 59 aa, Artificial Sequence
  Synthetic
DEVLRRARTLHDEHRRSVEESERRLKELLERNNEVIKDIERKLDKSNKELKDEAEKVKK

SEQ ID NO: 19801 - protein, 59 aa, Artificial Sequence
  Synthetic
SELEEIEKKVRELTKRHRELVERVRKTVKELIETNRRLLETLTERIKRVLEEVRDLERR

SEQ ID NO: 19802 - protein, 59 aa, Artificial Sequence
  Synthetic
DKALEEAKRVLRENNEVIKDIKRRLDELLKELEKSVRESEERLRRLLEEVKRVIEEVAT

SEQ ID NO: 19803 - protein, 59 aa, Artificial Sequence
  Synthetic
SSDREVEERVKRLTDRHRELLKRVEEEVKRSIKRNKDLLDELRKESEKLVKEARDLARK

SEQ ID NO: 19804 - protein, 59 aa, Artificial Sequence
  Synthetic
EDVLRLAEKLLKDNNKVIDEIRRRLDRLHEEHKKSVDDSREELKKSNKKLEEVVREIEK

SEQ ID NO: 19805 - protein, 59 aa, Artificial Sequence
  Synthetic
DDLREVEKEIRRIAEESKKLLEEIERAVEKILRDSRRVLEELARRAKRLLEELDKLKKN

SEQ ID NO: 19806 - protein, 59 aa, Artificial Sequence
  Synthetic
EDVRREVKRLVDELREVDRKIEEDLRELVRELEKVNREIRKRIEELVRRIKEVADEVRR

SEQ ID NO: 19807 - protein, 60 aa, Artificial Sequence
  Synthetic
DMEEKMRRITEEWRRVTEEIERRHREVIKKWRDVSREIAETHRRVIDELRRVLERIAERN

SEQ ID NO: 19808 - protein, 59 aa, Artificial Sequence
  Synthetic
KDIVDKELERLREEIRTSKKESDEVVKENEELIRDSKRKSEKVVRDNKRVIKEAEEKAK

SEQ ID NO: 19809 - protein, 59 aa, Artificial Sequence
  Synthetic
DEIEELLKEIKKLVDELRKRIEELAREHKRLADELRKKIKKLKDEHDRLVRELEKLAEK

SEQ ID NO: 19810 - protein, 59 aa, Artificial Sequence
  Synthetic
KEVKDKLDKLREELKRVADKLRDDLRELHKRLKEVADRLRKLLEDANRTLREVLKETKR

SEQ ID NO: 19811 - protein, 61 aa, Artificial Sequence
  Synthetic
SAEESAKRLKEELKKSLDRSREELDKLRKDNEKVLRDVEERLRRLIEELKKVLEDIKKDKG

SEQ ID NO: 19812 - protein, 55 aa, Artificial Sequence
  Synthetic
EELEKRVEKLLRDDKRRLDELRKESEDHIREIEDTLRRIEEEVKRLLKEMRDKLK

SEQ ID NO: 19813 - protein, 59 aa, Artificial Sequence
  Synthetic
SELETIARRVEKLNEDVERLLREAKKEADRLIKENEDLLREAERKVREIIERIRRLAER

SEQ ID NO: 19814 - protein, 59 aa, Artificial Sequence
  Synthetic
KEVKEKLTRLLKSHEDVIREVSRRLKELLDRYREVSDRIRKTLEELLKELRRVVEEVRK

SEQ ID NO: 19815 - protein, 59 aa, Artificial Sequence
  Synthetic
KDLEEIERKVRKLNEDDKKLLDDLRKEVEKALRRNEESLRKSREDAKKIIKEIEDLARR

SEQ ID NO: 19816 - protein, 59 aa, Artificial Sequence
  Synthetic
KEMKDALRELLRSHRKSSEDTKRELERLLREYEKVSRDVKRDHEKLLREIREVIEEVKK

SEQ ID NO: 19817 - protein, 59 aa, Artificial Sequence
  Synthetic
SELDEIRRRVEELIETDKDILRRIAEEVRKALEDNKKSLRESEEEVRRLLEEIKKLADR

SEQ ID NO: 19818 - protein, 59 aa, Artificial Sequence
  Synthetic
EEMKKLLEDLLRKSEDSTRETRKRLKELLDRYEEVSKKIKKRHKELIEELRKVIDDVRR

SEQ ID NO: 19819 - protein, 59 aa, Artificial Sequence
  Synthetic
RVEETLTRALKEIEEVIRRVDEESKRTIRSHREVIREVDEIHTRLLERLKKVIDDIRRR

SEQ ID NO: 19820 - protein, 59 aa, Artificial Sequence
  Synthetic
DRLLKEARDEVRKIIEEIRRLLEEHERTVKKLNEDIRKRLEESERTVEELLKRLRDRAR

SEQ ID NO: 19821 - protein, 59 aa, Artificial Sequence
  Synthetic
SMEEELKRLLESHEKVIREVRKTSEDTLRSHRKVIEEAKEEHKKLLEEIKRVVERVRKR

SEQ ID NO: 19822 - protein, 59 aa, Artificial Sequence
  Synthetic
ETVLREARKEVEKLNEDIRRLLEEHKRVVDELNKELRRLLEESRRRVKELIRRIEEEAR

SEQ ID NO: 19823 - protein, 59 aa, Artificial Sequence
  Synthetic
SVEERLRELIESHRRVIEKVERDSRRTIRSHEEVIKEVKKISEDTLREIRKVIEEAKKR

SEQ ID NO: 19824 - protein, 59 aa, Artificial Sequence
  Synthetic
ETLLRDAERRVEELNEEIRRLLEKHVRDVDRLNKEIRDLAREHKERAEEIIKRIEEKAR

SEQ ID NO: 19825 - protein, 59 aa, Artificial Sequence
  Synthetic
SEMERLERRARELLRRNEELMDDLRRKAEELLKRNDRLVKEIEKKVREVLRRIEELKRR

SEQ ID NO: 19826 - protein, 59 aa, Artificial Sequence
  Synthetic
KRLEELLRRLNEEHKRISDELRKLLDEALERHRELSRRLEEELERLLREIERLVEEVTR

SEQ ID NO: 19827 - protein, 60 aa, Artificial Sequence
  Synthetic
DDMERLEEEIKEILDRLRRLLERNRRVNKEIDERSKELVKRLEEKARRLLEELRRLKDRV

SEQ ID NO: 19828 - protein, 59 aa, Artificial Sequence
  Synthetic
KELEKKAEDVLREVKKVIDEVRTDSKRLNENLRESIKDVKREAERVLREVEEAIREVER

SEQ ID NO: 19829 - protein, 60 aa, Artificial Sequence
  Synthetic
REAEELKKEVDRILEELKKLLKENEDLNRDLDRKSKELLKENREKVERLRKELRELKDKV

SEQ ID NO: 19830 - protein, 59 aa, Artificial Sequence
  Synthetic
KELEDEAKRLKDEVEKLIEEIKRKSDELNKNLRDSIRRVEETTRDLLRKIKKLIDEIKK

SEQ ID NO: 19831 - protein, 57 aa, Artificial Sequence
  Synthetic
SIEEALEDLARRIKKILDDLRREAERLLREVEELLKRVEEANRRLRRTIEEALKRLA

SEQ ID NO: 19832 - protein, 56 aa, Artificial Sequence
  Synthetic
VETAEREIRRILEEIRRLAEEARRRIEEVLKRIKKHLEESKRRNEESLERIEREAR

SEQ ID NO: 19833 - protein, 60 aa, Artificial Sequence
  Synthetic
SVEETVDELKKRIEKILREIKRVNEELAKRNEDVNEEWRREVDKMIKDIERILRDVLRKE

SEQ ID NO: 19834 - protein, 56 aa, Artificial Sequence
  Synthetic
IEKLKRDAERILEEIKRAVDTSREESERTLKELRDMVKESRKDAEEVLERIDRDKR

SEQ ID NO: 19835 - protein, 60 aa, Artificial Sequence
  Synthetic
SVKETLEDLIKKIRDLLKRVRDENKRLAEDNERLNREVEKRNRELIKRIEDELEEVRKRE

SEQ ID NO: 19836 - protein, 56 aa, Artificial Sequence
  Synthetic
IRDLKREIEKILREIKKALEDSRRKSKETLDRIREVLKTSEEDIKRILKEIREAAR

SEQ ID NO: 19837 - protein, 61 aa, Artificial Sequence
  Synthetic
SREEVVKEIEKRVEELNRRLEETVRRVIEEMKRLNKESKEVSKKIVDEVRKLLDDVRREKG

SEQ ID NO: 19838 - protein, 56 aa, Artificial Sequence
  Synthetic
EDELRRLLERIEKTVRELKREIEKILEDATRTVEDLKRKNEELLRRLKKLADDVKK

SEQ ID NO: 19839 - protein, 59 aa, Artificial Sequence
  Synthetic
RVEEILRKASKENKEVIDRDRRLAEEATELNKRVVEEDRKVMKEVTKELEDVLRRAREE

SEQ ID NO: 19840 - protein, 59 aa, Artificial Sequence
  Synthetic
DKLLRELEERSKKVLEESKKTSEDLLRESEKHVRDWREKSRKLEEKVKRLVKKVKDTTD

SEQ ID NO: 19841 - protein, 60 aa, Artificial Sequence
  Synthetic
RAEDIIRELKRRNEEVLERDRELMERAARELREVLERLKDIAREASKELKRVLDELRKRG

SEQ ID NO: 19842 - protein, 59 aa, Artificial Sequence
  Synthetic
DEVVERLARESERVLRESEETSKDLKRKVDEELRRIEDTIRRLLKRVKDLVKKIEDTSR

SEQ ID NO: 19843 - protein, 60 aa, Artificial Sequence
  Synthetic
RLREIIEKLRRDNEKVIEEDRRVAEEVRKALEKVLREDRKMADEVTKELERALKELEDRG

SEQ ID NO: 19844 - protein, 59 aa, Artificial Sequence
  Synthetic
DEVIKELEKRSKDVLDESRDESRKLLERVERLLKKIREDSERLLERVEELLREAEETAR

SEQ ID NO: 19845 - protein, 60 aa, Artificial Sequence
  Synthetic
SVEEIIRKLEEDNRDVLRRDREVAKKVEDENRKVAEEDDRIVRRVAEELKRVLKELEDKG

SEQ ID NO: 19846 - protein, 59 aa, Artificial Sequence
  Synthetic
EKVIEELKDESRKHLEELEKDSKRLEDESKKHLDDWRRTSEKLLEDVERRVREIEEESR

SEQ ID NO: 19847 - protein, 60 aa, Artificial Sequence
  Synthetic
SSEEVVRELDKEIRKSIEDLKRIVRENEEENKRSVEDVREKAKRNEERLRKVLKEADERK

SEQ ID NO: 19848 - protein, 56 aa, Artificial Sequence
  Synthetic
IRELAKRVKRIVDENKRVAEEHHRKVERIVRENEKLLKEHHDRVEELVRRIKEEVE

SEQ ID NO: 19849 - protein, 57 aa, Artificial Sequence
  Synthetic
SEEEEVRRVLEELEKKVKRLTEEHRRRLDELRKKVKDHSRKNKELLERLREEIKRIK

SEQ ID NO: 19850 - protein, 59 aa, Artificial Sequence
  Synthetic
EEAKRVLEEVEKRVRELVKTNEDVLREIEEDVRRLVKENEDSIKESKDRLRELLERLKQ

SEQ ID NO: 19851 - protein, 59 aa, Artificial Sequence
  Synthetic
DEVEEIRKILEELAREAEKVVRETRKLLEDIRKEVEELNDRNRRLLEELERRVRDIKRR

SEQ ID NO: 19852 - protein, 59 aa, Artificial Sequence
  Synthetic
DEIRRVVEDVERRLRELLDRWRKVSEEVEKRLKELIDELRESIERSADRLRKLIEELKR

SEQ ID NO: 19853 - protein, 59 aa, Artificial Sequence
  Synthetic
REVEEIKKTLEDIRREAKELLDRTRELLDRLRKSVEELNRDNERLLREAKDEVEKVKRD

SEQ ID NO: 19854 - protein, 59 aa, Artificial Sequence
  Synthetic
EEIKKVVERVEREIEDLIRRWEEVSRDVEEKLKDLNKKVEESIRRSAKDLRELLREVEE

SEQ ID NO: 19855 - protein, 61 aa, Artificial Sequence
  Synthetic
SRAEKVLKRVTDLIRELLRTVTELVRRNREVIEELLRRVAKLHRDNRELNKKVLEDVRRDG

SEQ ID NO: 19856 - protein, 55 aa, Artificial Sequence
  Synthetic
EVVDELRRRIREVEKTLDRLLEESEERARRVLKELDRLLEESRKSSREVIEEAKR

SEQ ID NO: 19857 - protein, 56 aa, Artificial Sequence
  Synthetic
SVEELLKKLEKENRDVIREMKKLLDELEEENRRVIEEWRRITKELEDRNRRVREEI

SEQ ID NO: 19858 - protein, 59 aa, Artificial Sequence
  Synthetic
EEIIRRLVKHNKELVDEIRKTIERLREHNRKLVEKVREDVKRSTKHNRDLVKEVRDRAK

SEQ ID NO: 19859 - protein, 56 aa, Artificial Sequence
  Synthetic
SLEELLDRLRKLNETVIRDMERVLKELEERNRKVIKEDRDVLEELARRNEKVKRDI

SEQ ID NO: 19860 - protein, 59 aa, Artificial Sequence
  Synthetic
EEIAKELVKHNEKKVREIKKTIDDLRKHNEELVKEIRETSERLREHNERLLREALRRAK

SEQ ID NO: 19861 - protein, 60 aa, Artificial Sequence
  Synthetic
DLEEVVKDLERKLRDVARKDRKLVEDSRKILKDVVDKDRELVERSRRILEEVLERIRRRG

SEQ ID NO: 19862 - protein, 59 aa, Artificial Sequence
  Synthetic
RDTARKLLEDVADELRRWLEDSERLHKENKDTIEKWLRRSRKLHEENRKLIEDLLRTVT

SEQ ID NO: 19863 - protein, 59 aa, Artificial Sequence
  Synthetic
SLEDVLRELKERLERSHRKLRELVRRLEEDLKRVLRELEKIVDEVRKINEDVRREVERR

SEQ ID NO: 19864 - protein, 59 aa, Artificial Sequence
  Synthetic
EDIVRKLLEDVRKLVEELDRRAKELEERVKKVVDELLEKARRLLEKNRRTVEKILRDVK

SEQ ID NO: 19865 - protein, 60 aa, Artificial Sequence
  Synthetic
SEVEKLLREVEDRDRRILKKVKELLDEVRRLIEDHLRRSEDALRRVRKRIEELKELVERG

SEQ ID NO: 19866 - protein, 59 aa, Artificial Sequence
  Synthetic
ERLEEMLRRLKKSIEDSVREVRKVLKEAKDIARKVIEDTKRLLEELKRIMKKVLDELRK

SEQ ID NO: 19867 - protein, 60 aa, Artificial Sequence
  Synthetic
SEIEELVERVKARDEKHLRDSEKLLEEVKRRDRKLEEDSKKLLKDVKDLLRELEEVAKRG

SEQ ID NO: 19868 - protein, 59 aa, Artificial Sequence
  Synthetic
ERLRKLLDDLRKSIEESRKRSEEILREAEDTMRKSVETNERLLEELERELRRVVEELRR

SEQ ID NO: 19869 - protein, 60 aa, Artificial Sequence
  Synthetic
DEIERVLEEVERIDRELLKRSEDLLREVRERDKELEERSKRLLEKARRLIETLRDMARKG

SEQ ID NO: 19870 - protein, 59 aa, Artificial Sequence
  Synthetic
ERVKTIIDEARKSIDDSVRENKKVLDELKETIERSKKKNEDILREIEKILEEVREELRK

SEQ ID NO: 19871 - protein, 60 aa, Artificial Sequence
  Synthetic
KDVDELLERVKRRDEELERKVEKLLKRVRDLIREHDEKVKELEDEVRDRIKKLLEMAERG

SEQ ID NO: 19872 - protein, 59 aa, Artificial Sequence
  Synthetic
EELERVLRELKRSIETSTRRLRKILEELRRILEESERKVEEVLKELERIAREVEERLRT

SEQ ID NO: 19873 - protein, 60 aa, Artificial Sequence
  Synthetic
SDIEDVVRKVEEEVRDHNRRVEELLKRVERRDRRLEETVEELLKEIEDKLRRLKEMAERG

SEQ ID NO: 19874 - protein, 59 aa, Artificial Sequence
  Synthetic
ERLEKLLRELEETLRRSKERVKEVLEDLKRTITESKRRLKKILDEIRKRLEEVERDLKR

SEQ ID NO: 19875 - protein, 60 aa, Artificial Sequence
  Synthetic
SLEEVVDKLRRDSEESLKKNETVLRRVTKELTELLKRWREASERLKEELREVLERVRKKG

SEQ ID NO: 19876 - protein, 59 aa, Artificial Sequence
  Synthetic
EDTLRKLAEEVKRVVRDDEEKVKRLEEEVKEEVKKLEDDLRRSEERVERTIREIEKRAK

SEQ ID NO: 19877 - protein, 60 aa, Artificial Sequence
  Synthetic
SVEDLVREVERRLKTVLDEDEEVLKRVEDESRESIKENEEVLREVSERLDKVLKDVRRRG

SEQ ID NO: 19878 - protein, 59 aa, Artificial Sequence
  Synthetic
EEDLKRLEDRVEEEVRRAKRESDELLKRVRRTVEDDKRRLRELREEVKDLLERIREAEK

SEQ ID NO: 19879 - protein, 60 aa, Artificial Sequence
  Synthetic
SEVDEVRKRSEKVVEENERRIEESERRIAKLVKEVRDVIEDAKRRVEEILRRLEEEMRKG

SEQ ID NO: 19880 - protein, 56 aa, Artificial Sequence
  Synthetic
KDVLEEMRKTHERVIKEWERAHKEVNEKLEKIIRELEKVLEEVEDEAREVIRRLET

SEQ ID NO: 19881 - protein, 59 aa, Artificial Sequence
  Synthetic
SASEDLERVLRELAKEVEKLLRESEKLLKELEDLARELLERDRKLLKELEEKVKRLKER

SEQ ID NO: 19882 - protein, 56 aa, Artificial Sequence
  Synthetic
ERVLDDVRKRIEDLVRELKKVNEDIEKKVRELIERLRRSLEKSKEDIRRLVEELRR

SEQ ID NO: 19883 - protein, 60 aa, Artificial Sequence
  Synthetic
DMSEELEEILRRLEEESRRHLRTDEELLRELEEKIRRLLREIEEILERLKKRIDEVKTRN

SEQ ID NO: 19884 - protein, 56 aa, Artificial Sequence
  Synthetic
ERVLKRVKDRIDELIRRNEESLERTRDEIRKLIEELKKVLDRVKEEIEKLVEALKK

SEQ ID NO: 19885 - protein, 59 aa, Artificial Sequence
  Synthetic
EMTERLERVLEELKRKSDEHIKTDEELLRRLEKKSRDHLRELEEILRRLEREAREVKRN

SEQ ID NO: 19886 - protein, 56 aa, Artificial Sequence
  Synthetic
REALKKVEDAIDKLRRDNERSLERTKREIERLIRENKDVLDKIEKRIRELIEELER

SEQ ID NO: 19887 - protein, 59 aa, Artificial Sequence
  Synthetic
SADEKLDKILREMKKRSDDHIREVEKILRDLDREVKEILKKDEKLLRDLDRRVKDVKRR

SEQ ID NO: 19888 - protein, 56 aa, Artificial Sequence
  Synthetic
DEVLKRVEETVRRLVEENKKVLDRVREEIRKLIEELRDSLRRSEKRIRELADELRR

SEQ ID NO: 19889 - protein, 59 aa, Artificial Sequence
  Synthetic
DLEDILREIARLIERLIDENRKVLEEIARRLKELIEELKKSLKRSEELLRRLEKELKDS

SEQ ID NO: 19890 - protein, 59 aa, Artificial Sequence
  Synthetic
KDLLRTLEKVAEDLKRRSERHIRELRRTLEDLERDVRRLLREDEEKLKRAAEEVKEAIK

SEQ ID NO: 19891 - protein, 59 aa, Artificial Sequence
  Synthetic
DLEDVLRDIERLLRDLIRRNKEVLDRIRELIKKLIDENRKSLKRSKEELERLIRELAKS

SEQ ID NO: 19892 - protein, 59 aa, Artificial Sequence
  Synthetic
EELLRRLREVLERLKRESEKHLEELKKILEDLERESRRHIEEDKRLLKELKEEVDERIR

SEQ ID NO: 19893 - protein, 59 aa, Artificial Sequence
  Synthetic
SLEEVLKRIEDELRRLIEENKESLERSERLIRELKKRLEEVLRRIKKLLEELIRRLEES

SEQ ID NO: 19894 - protein, 59 aa, Artificial Sequence
  Synthetic
KKLLEDLKRTLDELRRESEEHIRRDERLAEELAREVEKLLKDMERILRELAKEVEDRIK

SEQ ID NO: 19895 - protein, 55 aa, Artificial Sequence
  Synthetic
DASRRVEEKLKEVEERVRKLLEEDRKRLKDSKRKVEELIERDKTELKKVKDRADG

SEQ ID NO: 19896 - protein, 56 aa, Artificial Sequence
  Synthetic
KKVIDTVRKRLKELLDELKKSVEDTHRENRRVLKELEESHKRTNERLDDLLRELER

SEQ ID NO: 19897 - protein, 59 aa, Artificial Sequence
  Synthetic
SLEDVVRRVREELERLLRTHEEVIRRVEEELRRLLEEYRKVSKEIEEDLRRLLKEVRDR

SEQ ID NO: 19898 - protein, 60 aa, Artificial Sequence
  Synthetic
VEDLLREIKKELEDVKRKVDKLNEEVERILKKAKDEVKEAIKENRDRLRRLRDEVRRLKK

SEQ ID NO: 19899 - protein, 59 aa, Artificial Sequence
  Synthetic
GLEDVVRRVEKRLEDLLRRYKKVSERLEREHRRVLDEYRKVSEEIDKILRDLLKEVRDS

SEQ ID NO: 19900 - protein, 60 aa, Artificial Sequence
  Synthetic
VEELLKEIEKLLKDIERTVEKALKENKDSIRRSKEKVDRMIKRNRELAKELEDKVRELKR

SEQ ID NO: 19901 - protein, 60 aa, Artificial Sequence
  Synthetic
SIEDILRELADTIRRLTEESEKILRKAEELLRRLTEEWRKSLKDLEDLIRKLIEEIRRRG

SEQ ID NO: 19902 - protein, 55 aa, Artificial Sequence
  Synthetic
EEIKKLMDEIRKKVEKHLREVEKVLREVEEEVKRELRKSEELARRIEEKIRREKK

SEQ ID NO: 19903 - protein, 61 aa, Artificial Sequence
  Synthetic
SEVEEALRRMEETIRRVREKLKKSLEDMRREIERIRRELEKSLEEFERDIERITRDIRRRG

SEQ ID NO: 19904 - protein, 56 aa, Artificial Sequence
  Synthetic
DDALRKIEELVKRLDRELREVNKEIEKVVRELKEELKRVDDEIERLVRELRKEAER

SEQ ID NO: 19905 - protein, 59 aa, Artificial Sequence
  Synthetic
DEIDEIRKVAERLEKEARELVKENEDDLKRHKERVDEIVKKIEEKVRRLEETARKLKEE

SEQ ID NO: 19906 - protein, 59 aa, Artificial Sequence
  Synthetic
EELKKVLEDLRRVLEKVHKLNREVLDKHREIVKRLSDKIKTVLRKLEEILKRAEEELRR

SEQ ID NO: 19907 - protein, 56 aa, Artificial Sequence
  Synthetic
SIEELLEEVERVVREVERRLDELLERNRRVIEEVRRRDDKLTKENEDVIRDVRRAG

SEQ ID NO: 19908 - protein, 60 aa, Artificial Sequence
  Synthetic
EEDLIREVEKRLEDIKDLLRRMKEEVERHSREVEDRLRRSEERWRDHSKKVKERLDRATT

SEQ ID NO: 19909 - protein, 59 aa, Artificial Sequence
  Synthetic
SLEEEVRRLLEEIKRLADENRDYVRRSLETNKKTNKDNRDEIRKALERIKRLAREIERI

SEQ ID NO: 19910 - protein, 56 aa, Artificial Sequence
  Synthetic
EKLLREVEELLRRVEEEHERLHRENRKLNDKDRETLERLIREVDDLLRKLEEEARR

SEQ ID NO: 19911 - protein, 57 aa, Artificial Sequence
  Synthetic
RVDELLEEVRKLVKDVHDTTEELLKEVERRLDEVKKRVDRSNEEVKELVKEAVKRSG

SEQ ID NO: 19912 - protein, 56 aa, Artificial Sequence
  Synthetic
DTKIEELLRRIEKYMRESKERIDRLLERIDEVLEKNERDVRKLLEDIRRMIEKDDT

SEQ ID NO: 19913 - protein, 59 aa, Artificial Sequence
  Synthetic
DTIERLLEDIKRILDKNRRDARRVLEEIKRSNEKNREDIKRIEEEIDRLLKEIKKKAEE

SEQ ID NO: 19914 - protein, 59 aa, Artificial Sequence
  Synthetic
KDVVKEVEELLKRVEETHRKLNKEVEELLERDERDLRRLIDDVRRLLEEVRKTLEDLRR

SEQ ID NO: 19915 - protein, 59 aa, Artificial Sequence
  Synthetic
RELEEARERIKELLEEIKDEVRRWREKIKRLLEDSRRKAERLKEDIKRLLEEIKKLSDD

SEQ ID NO: 19916 - protein, 59 aa, Artificial Sequence
  Synthetic
EDALRDIERLLREVDDAFRRLVEELRRLNEEVHRTTDELIREVEDMLRKVEEALKREKD

SEQ ID NO: 19917 - protein, 57 aa, Artificial Sequence
  Synthetic
EEIERVLEEIKRTADEIRKEIERVLEKSKKLLDDHHEEVKRMLERIRDKAKKVTDRG

SEQ ID NO: 19918 - protein, 58 aa, Artificial Sequence
  Synthetic
KVVEELRKILERLKDLVRDLERKLDELNKRVRDRVEENRKELEKLLREARDRIRELER

SEQ ID NO: 19919 - protein, 60 aa, Artificial Sequence
  Synthetic
SLEDRLREVLKRYEDRSRDLERELKRVLDEYDDSSRKVAEELKKVLDEIRETVERIKKDV

SEQ ID NO: 19920 - protein, 59 aa, Artificial Sequence
  Synthetic
EKEVADLVKKLEDDLRRTSDKVRRVVEEIKRRLEELERRYKALVKKLRDKLREIKEEVR

SEQ ID NO: 19921 - protein, 61 aa, Artificial Sequence
  Synthetic
DVEEELKKVDDKVEELVRKVIEDIRRALERVRELVERVRRKLEETNKKLKKLVEDIVRKKG

SEQ ID NO: 19922 - protein, 58 aa, Artificial Sequence
  Synthetic
EKVEELLRKSEELAKRIEDDVRRVLRKLEDTVRRIKEEIDRLLKDNERIIEEVKRRAD

SEQ ID NO: 19923 - protein, 61 aa, Artificial Sequence
  Synthetic
SVEEIIEDMLRKVRELVRRVRELLREVDEKLKKLVEDVRRRLEKTNKELKDLVEDIVRRSG

SEQ ID NO: 19924 - protein, 58 aa, Artificial Sequence
  Synthetic
EEAKRVLDKLRKTAEDIKRTIDELLKRSEETIKKIEDKIDKLVKKNKELVKRIEDEAR

SEQ ID NO: 19925 - protein, 60 aa, Artificial Sequence
  Synthetic
SLRELLDEVRRAVEESNRELERLLEEVDRSNRESHRELKRLLEKIKKLAEEVERELERKG

SEQ ID NO: 19926 - protein, 60 aa, Artificial Sequence
  Synthetic
EEEVKKAVEDLKRLVDTHKKRVEEVIDELRKHSEKHSEEVRRVITELARRLEELLDEIRR

SEQ ID NO: 19927 - protein, 59 aa, Artificial Sequence
  Synthetic
SAEEKVEDELRKHHEEVKRLLEEIEKTMRDHHREVEETLKDSRRELKRIEEEARKVKER

SEQ ID NO: 19928 - protein, 56 aa, Artificial Sequence
  Synthetic
EDILRKLEEEVRRNDKELRDLLEELKDLVRRNDEELRKLNEEVRKRVEELIEELRR

SEQ ID NO: 19929 - protein, 57 aa, Artificial Sequence
  Synthetic
SIEEMLKRVKEESKRSNDKIRDVLRKVEETSRRSKERIDKLLRDVERTVEEVIRDVK

SEQ ID NO: 19930 - protein, 60 aa, Artificial Sequence
  Synthetic
EKDVLDRLRRYVEENRRRVEKLIRDLEDAVRRNEDDARRVAKEIEDVVREIKDRVDKTRT

SEQ ID NO: 19931 - protein, 57 aa, Artificial Sequence
  Synthetic
SEVDKKLEDIRRRLEKLERETEESLDRVRKELEDLEKESRESLKRLREDLERVKKTK

SEQ ID NO: 19932 - protein, 59 aa, Artificial Sequence
  Synthetic
KKKADELRRVIEEIIRRLRELDEKHRRLVEEIIRRLEELNREHSKVVEEIARELKKTAK

SEQ ID NO: 19933 - protein, 56 aa, Artificial Sequence
  Synthetic
SLLEELKRSIEESIRTLKELLDRLEELIRRIAEEIRRLLEEHSRKTEEVIRRAEKA

SEQ ID NO: 19934 - protein, 59 aa, Artificial Sequence
  Synthetic
EKVIEELKRKLEEENKRLKKVVEEIAKTLKDLLDEVRRRIEDSLRKLEELLERVERKTR

SEQ ID NO: 19935 - protein, 57 aa, Artificial Sequence
  Synthetic
SLLEKLEKLIRDIKRTVDKLLEDNEETIRRIIRDIERLLKRHSDETREVVRTLKERG

SEQ ID NO: 19936 - protein, 59 aa, Artificial Sequence
  Synthetic
KDVIERIERELRELLKKLKEDADRHNEDAERKLRRLRDTIRRSLKKLEEDLRRLSKEAE

SEQ ID NO: 19937 - protein, 60 aa, Artificial Sequence
  Synthetic
SRVEETLKRLEDELKRIEEEVRKLLDELRRHLEENRRRTEKLLRELREELERVRERVEKG

SEQ ID NO: 19938 - protein, 59 aa, Artificial Sequence
  Synthetic
EKLLRRLERLVREIKRRLEELLKRLADLVRELKKEHERLNRELEELVRRIKERLKEAEK

SEQ ID NO: 19939 - protein, 56 aa, Artificial Sequence
  Synthetic
EEEERIKERLDRSVEELKKSADKMREEIERSEKKLKESADRVRKEIEDALRRIREE

SEQ ID NO: 19940 - protein, 59 aa, Artificial Sequence
  Synthetic
EDVVRRVEELLRRHEEVTKTINREIEELIKTHERSTRELNKEIKELIERLEETIKERTR

SEQ ID NO: 19941 - protein, 56 aa, Artificial Sequence
  Synthetic
KDAEELERRLRKSAEDLKRSAEEMKKRLDKSREDVKRKVEEAKKIVEDLEEDLKKR

SEQ ID NO: 19942 - protein, 59 aa, Artificial Sequence
  Synthetic
EEMVKRLRELLRTHEEITERINRKIEKLLREHEEETKRLLDDLRRLLEELRKKIEEEKR

SEQ ID NO: 19943 - protein, 56 aa, Artificial Sequence
  Synthetic
DEEERIEEELRKSTEKLKESLDRMRRDIEKSAEDLRKSVEDVERDMRRLLEDIEKR

SEQ ID NO: 19944 - protein, 59 aa, Artificial Sequence
  Synthetic
KDALERVRRLLERHERETRRINEEIERLIRRHVEETKRVNKRIKRLLDELKRRIEEKSK

SEQ ID NO: 19945 - protein, 56 aa, Artificial Sequence
  Synthetic
SEEEEIKKRIDDARKELEESTREVRERLRDSMRRLDESLKRVEEEIRKLADDIRRR

SEQ ID NO: 19946 - protein, 59 aa, Artificial Sequence
  Synthetic
EEVVRRVRELLKRLKEEVDRINDEIRKLLEDHKKRTEEVNETIKRLIDRLEEELRRRRE

SEQ ID NO: 19947 - protein, 60 aa, Artificial Sequence
  Synthetic
SEVEKIIEKIRREEDRNRREVEEKLKRIREHVRRNEEDTRRIIRELRELLKEALDRLRRG

SEQ ID NO: 19948 - protein, 59 aa, Artificial Sequence
  Synthetic
EKLLRELEELIRRVKKRHDELLKEVADLVKEVEDRHRKLNEELERVAREIEETLKRELD

SEQ ID NO: 19949 - protein, 57 aa, Artificial Sequence
  Synthetic
SEVETLLDKIRRDNEDLNRRVREELERIRKADEDVNREIEKVLRDIEEAIRKLKRDR

SEQ ID NO: 19950 - protein, 59 aa, Artificial Sequence
  Synthetic
DELVRRLEKILREHEENIKRIVEELERLLEEHKKNLEDLKRRLRDILRKVEEELDRTRK

SEQ ID NO: 19951 - protein, 57 aa, Artificial Sequence
  Synthetic
SETEELVKKIDKRDKEVKERAKRVVDEIKERDKRVNEEIEKVLRDIERTIKKVREDR

SEQ ID NO: 19952 - protein, 59 aa, Artificial Sequence
  Synthetic
KEMVDRLRELLERHEKTIRDLVRTLEELLERHRKNIEDLVRELRELLDRAREELKRTAD

SEQ ID NO: 19953 - protein, 57 aa, Artificial Sequence
  Synthetic
SDIEEALKKIKKMTRELREEIKKTEEESERRAKELEKEVRDYLRKVEEEAKRLKDTK

SEQ ID NO: 19954 - protein, 62 aa, Artificial Sequence
  Synthetic
EDIRRVLEELKKVLEENNRVIEELARRLDELNKKLRELLERIKKTLDDLNKRLEKLIRDTEK

SEQ ID NO: 19955 - protein, 57 aa, Artificial Sequence
  Synthetic
SKIEKMLRDIEKKTKELEDEIREALKRLREIAEKLKDEVEKYIRELRELLKRLAETK

SEQ ID NO: 19956 - protein, 62 aa, Artificial Sequence
  Synthetic
EKIREALERLRKILRENNEVIRELVERLRKVLEDLKRTVKTIEDRLRKVNEDLKRLIEELER

SEQ ID NO: 19957 - protein, 57 aa, Artificial Sequence
  Synthetic
SEAEKLIEDIKKLIEDHKKRTKELIDEIEEDIKKHREDVERLLRDIERLIEELEREN

SEQ ID NO: 19958 - protein, 59 aa, Artificial Sequence
  Synthetic
EEVERKVREAVKDVRRVLDESRRRLDTAIRKVEEDLRKSREDLERAVKKLRDVLEELKR

SEQ ID NO: 19959 - protein, 60 aa, Artificial Sequence
  Synthetic
SEVEKLERKTEKILKDLKDEVKRAEEETRRILEELKKMLEDMEKRTREILKRIRDLARDG

SEQ ID NO: 19960 - protein, 56 aa, Artificial Sequence
  Synthetic
EKKLRELNTELTRLIDEIRKRLEELNERLRKLVEEIEERLRRLNEELKRLVEEIRR

SEQ ID NO: 19961 - protein, 57 aa, Artificial Sequence
  Synthetic
KELEDTAEESKRELEKIRDEVRKEEEESEKLLRKIEKELREYAEKTRRILEKLRRDQ

SEQ ID NO: 19962 - protein, 59 aa, Artificial Sequence
  Synthetic
EEVARLLKKLNDELRRLIREIEERLRKLNDDLRELIERVEERLRRLNEELEKVIRELET

SEQ ID NO: 19963 - protein, 57 aa, Artificial Sequence
  Synthetic
DEVEDTERRSKKKLEELEEELRRTATESKRTLEELKRRLEDEERRSRDALRRLKEAN

SEQ ID NO: 19964 - protein, 59 aa, Artificial Sequence
  Synthetic
EEVKRRLERLNEEIEKLIRDIERTNRELNKELEDLIKEIEDRNRKLNEDLRRLIDELRK

SEQ ID NO: 19965 - protein, 61 aa, Artificial Sequence
  Synthetic
SELEEIAREVKETSKRHEEHVRRSEEEVKKTLKRLKEHVDKSSEDAERTLEELERRLRRDG

SEQ ID NO: 19966 - protein, 55 aa, Artificial Sequence
  Synthetic
DELRRLKEELKENIERAEESHKELADRLRELIKRIKERHEELLRRLRKLLEEIRK

SEQ ID NO: 19967 - protein, 60 aa, Artificial Sequence
  Synthetic
SAEEDLERLIRALKKVLDDHERLLRELLRRLEEVVRRHKELLKKLNRDLEEVLKDIKEKK

SEQ ID NO: 19968 - protein, 55 aa, Artificial Sequence
  Synthetic
DETDKEVRDTIRRIRKHSREVAEEVRKIIEELRRHSKKMADDSKRTIDELRERAK

SEQ ID NO: 19969 - protein, 60 aa, Artificial Sequence
  Synthetic
KVEEELDRLLKEIEKIIEEHRKKNKKLNDDIRRLIEEHERDLRELLKELEKLIRDLKKDL

SEQ ID NO: 19970 - protein, 59 aa, Artificial Sequence
  Synthetic
DRAVEEVRKRIEEILKRIRDNSKRVEEETRELLERIRRNSERLRRDVERLARELEEKKR

SEQ ID NO: 19971 - protein, 57 aa, Artificial Sequence
  Synthetic
SDEERLEEKLRRVEREVEKKLKRLKEELEEYARRVKEMSDRHREEVERFEEEVRRRG

SEQ ID NO: 19972 - protein, 59 aa, Artificial Sequence
  Synthetic
DTLRKLMEKIKRALEELLKRLEDLVRRIEEELRRLNEELRKNIREAEERLRKLKEDAER

SEQ ID NO: 19973 - protein, 60 aa, Artificial Sequence
  Synthetic
SADEILKEIEDTIRKLIEDNKRTLEEHERRTRKLIRELRELLKRHKTESRRLAEELKKDG

SEQ ID NO: 19974 - protein, 56 aa, Artificial Sequence
  Synthetic
GEEVRKRLEELKKKVERENRRHREHLKKVAKEVKRTLDEIRRHLEEVKERVKRARD

SEQ ID NO: 19975 - protein, 56 aa, Artificial Sequence
  Synthetic
SEEEELKRRVDEVRKRTKEIIEELKRHVDRNERTVREIIKRLEEEVRRVAEKVKRG

SEQ ID NO: 19976 - protein, 56 aa, Artificial Sequence
  Synthetic
SKVVEDVRRTLKRLNDELRKVVKDARELHERLLRDLKRVIDRIRERLKRLLDEAEK

SEQ ID NO: 19977 - protein, 57 aa, Artificial Sequence
  Synthetic
DEVETLAREVKKSNDDDRRKTKKTADDVEKKLEDLKRRDEEVRERVEEDLKRLREKV

SEQ ID NO: 19978 - protein, 59 aa, Artificial Sequence
  Synthetic
KEVLDRVADEIRRLNKETNDVDRDVRRRIDKLVEDVKRVTEEVSKEIKRLAEEVDRRIT

SEQ ID NO: 19979 - protein, 57 aa, Artificial Sequence
  Synthetic
DEVEELKRKVRESNKRDEDETRRTEERVEREVRRLEEEVKDVKRKVERELERIAREI

SEQ ID NO: 19980 - protein, 59 aa, Artificial Sequence
  Synthetic
REVVKEVEDRIRKLNRETNEVDKEVRKRVDDLIRDLERVLREVKEEVDRLVRKVEEDAK

SEQ ID NO: 19981 - protein, 61 aa, Artificial Sequence
  Synthetic
DEVEELVKRAEDILERLKREVDRLIKESEDLNRRIRKHVEDTIKEVRKRLEELRKEVEDRA

SEQ ID NO: 19982 - protein, 60 aa, Artificial Sequence
  Synthetic
AKDLLKEVVERVTRVAKAVKEKLDEVVRESREVIKRVEEKNRRVLEEVERVARELKKAID

SEQ ID NO: 19983 - protein, 61 aa, Artificial Sequence
  Synthetic
DEVEELVRRAEEELKRLRKHVEETVERSKKLNDEIKKHVDRTVKEAKDELRRLREEVKKRG

SEQ ID NO: 19984 - protein, 62 aa, Artificial Sequence
  Synthetic
EEAKKLLEDVARRVRKVAEELKKKNKELLETSDRVIEKVRKKNEDLKRTVDEVARRLEEAIK

SEQ ID NO: 19985 - protein, 60 aa, Artificial Sequence
  Synthetic
SEVDEVVERLRRISEELDRRVKKLVKDARRISKELEEAVRRVVKTAKDANKELRKEVRER

SEQ ID NO: 19986 - protein, 56 aa, Artificial Sequence
  Synthetic
VDTLAEDAKRSARETEEILRRLVKKLEESARDTKRIIDELDKELKDSNEEVRRRLK

SEQ ID NO: 19987 - protein, 57 aa, Artificial Sequence
  Synthetic
DEAEEVVKDVEREVRRLEKENRDLVERSKRLVERLEKESRDLVRKSREDVKRLREKG

SEQ ID NO: 19988 - protein, 56 aa, Artificial Sequence
  Synthetic
EEELRKDVERVVKKDEDITDEVRKENDEVVKKNEDIIDELRKKNEEVLRRVDEEAR

SEQ ID NO: 19989 - protein, 56 aa, Artificial Sequence
  Synthetic
SEVEDVVRKVRELVKRLRDESRRLVEESRRLVEELEKRSRDLVKTAEDIVRELKEA

SEQ ID NO: 19990 - protein, 56 aa, Artificial Sequence
  Synthetic
KDELDKEVKEAVKKNREIIRRLEKRNRDVVEENRKIIEDIEKKVRDVVREVRREAK

SEQ ID NO: 19991 - protein, 60 aa, Artificial Sequence
  Synthetic
SSLEEVAERVKKLVRELEESTKTVEELVRRLVTELRKSTEKVRRDVDKLVKELEEIIRDV

SEQ ID NO: 19992 - protein, 58 aa, Artificial Sequence
  Synthetic
REVKRLVEEVEKLIERLRRESRRLIERVRREARELKEESRRLEEEVRKKIEELARRVK

SEQ ID NO: 19993 - protein, 60 aa, Artificial Sequence
  Synthetic
RDLEEVKKKVDKLVRELEESSKKVRKDVEDLVKELEDTTRDVKRLVEELVTRLKRIIEKV

SEQ ID NO: 19994 - protein, 58 aa, Artificial Sequence
  Synthetic
REVKKIIEDVEREMERLERDSRRIVKEVREEADRLRKESKRLEEDVKRKLKELRERVN

SEQ ID NO: 19995 - protein, 60 aa, Artificial Sequence
  Synthetic
DELERVKEKVDKLVAELEKSTDDVKKKVEDLVRELERSSEKVKKDVDRLVKELEDIIRRV

SEQ ID NO: 19996 - protein, 58 aa, Artificial Sequence
  Synthetic
REVKKVVEDVRREAKRLKERSKKLEDEVRDLLRELEKRSDEITKRVREEMKRLEDEVK

SEQ ID NO: 19997 - protein, 60 aa, Artificial Sequence
  Synthetic
DELEDVKRRVEKLVRELEESSKEVRKRVEDLVRELERTTEEVEKLVRDLVRRLEDIIRRV

SEQ ID NO: 19998 - protein, 58 aa, Artificial Sequence
  Synthetic
EDIKRLEEDVERKLRRLEEESRRIVEEVKKEAERLKERSERLTKEVRELADRLAREVD

SEQ ID NO: 19999 - protein, 60 aa, Artificial Sequence
  Synthetic
RELEEVKRRVERLVRELEESLRRVRKEVEDLVRDLERVSKEVEDTVRELVRRLDEVIRRV

SEQ ID NO: 20000 - protein, 58 aa, Artificial Sequence
  Synthetic
REVKTLVEEVRRLLEELERRSRKLVKEVRDEAERLKREDEEIIREVRELLKELERKVR

SEQ ID NO: 20001 - protein, 55 aa, Artificial Sequence
  Synthetic
DELEEVKRTVEELLERLERVNKDVKRKVKELLDRLREVDDRVKKEVKRLIEEVKN

SEQ ID NO: 20002 - protein, 58 aa, Artificial Sequence
  Synthetic
EEIKKLADRVRRELKRSEDHTKRLAEEVRKDLEESRKHTKELEKEVEEELRRLKKEVR

SEQ ID NO: 20003 - protein, 55 aa, Artificial Sequence
  Synthetic
SELEEAAKAVEKLAREAEKSSEDARRAVERLAREAKRANDEAEKAVRELAERARR

SEQ ID NO: 20004 - protein, 58 aa, Artificial Sequence
  Synthetic
KEAKKLAKEAREIADRLRRESEEIAREAEKIAKELADHTRELAERARRIADKLKKDVK

SEQ ID NO: 20005 - protein, 60 aa, Artificial Sequence
  Synthetic
SAEDLIREVRRRVKELERKLEEILKRSEDLTRRLREEAERILKESRDRVRKLEEDARREA

SEQ ID NO: 20006 - protein, 55 aa, Artificial Sequence
  Synthetic
KEVIKKIRDILRRLSEELEKVLEDSERILRRLEDELRESLKRTEEILRELRRELK

SEQ ID NO: 20007 - protein, 56 aa, Artificial Sequence
  Synthetic
SVDEVLKEIEDALRRLKEEVERVLKENEDELRRLEEEVRRVLKEDEELLEELKRKV

SEQ ID NO: 20008 - protein, 59 aa, Artificial Sequence
  Synthetic
EKKIRDVAKEIRDRLKELEEEIEEVTRRNKKLLDDVEEEIRRVHEKTRRLLETVLRRAT

SEQ ID NO: 20009 - protein, 56 aa, Artificial Sequence
  Synthetic
RLEEVVEEMERLIRDLEKKVEDARERNERLVRESRKKAEELIKELRKLLRELEEEI

SEQ ID NO: 20010 - protein, 56 aa, Artificial Sequence
  Synthetic
VETVLKRVREVIRRVEETIKRLDDRNKESSEDVERRLRELLREVREIIKRVREKTR

SEQ ID NO: 20011 - protein, 56 aa, Artificial Sequence
  Synthetic
RLEDVVRESKKLVEESERRVREAIRRNEELVKDSEREAREVIEELKELLRRLEEEL

SEQ ID NO: 20012 - protein, 56 aa, Artificial Sequence
  Synthetic
VEDLLREVRRVDKEANEKIEELDRRNKKSSDDVKKKIRDLKREVKKVIDEVRERTR

SEQ ID NO: 20013 - protein, 57 aa, Artificial Sequence
  Synthetic
SELEKVLTESRDVVRRATKRLREVHKKTKEVVDRLREKLKRVEDEVRKAVRELEEKV

SEQ ID NO: 20014 - protein, 59 aa, Artificial Sequence
  Synthetic
KRLEDVLKESKKLTDDLRKDAKRVLDEDRRLVEELKKELDEARKRVEDLVREVKDRARR

SEQ ID NO: 20015 - protein, 60 aa, Artificial Sequence
  Synthetic
DEVEEVRKRVEEVIRRNEERIEDVRKKVEDVIRRNEKLVDDVRREVKEVLDKLRELLERR

SEQ ID NO: 20016 - protein, 60 aa, Artificial Sequence
  Synthetic
KETVDEVAERLKKLLEESERRVKRVLDEARKLVKRSEDRSKKVLDELEELLRRVRKEADK

SEQ ID NO: 20017 - protein, 61 aa, Artificial Sequence
  Synthetic
RELEELLEEARRSSEEVKKILKKLKKEVDESSERLERIIEKLLRDAKRVADEVRDILEKKR

SEQ ID NO: 20018 - protein, 60 aa, Artificial Sequence
  Synthetic
EERVKRVIDELRELLRRSREEVKRVVEELKKELERSKREVERVIDELRRLLETVEKEIRD

SEQ ID NO: 20019 - protein, 61 aa, Artificial Sequence
  Synthetic
SELEDLKRRIRKSSEDSKKSLEDSDRTIEESSRDSSRTARESERKLEKVLREVDDILKKVK

SEQ ID NO: 20020 - protein, 60 aa, Artificial Sequence
  Synthetic
EEDVERIVRELEELVRKSREDHKRVIDALREKLKKSREEHRRVIDKLRRELKRVEDEIRR

SEQ ID NO: 20021 - protein, 61 aa, Artificial Sequence
  Synthetic
SILEKLEREVRKSSRESRESAKKSLREIEESSRRVEEELERLLREVRRVAEEVLDILRRKK

SEQ ID NO: 20022 - protein, 60 aa, Artificial Sequence
  Synthetic
REEVKRIIERLRKLLEDSKRDHEEVIKELRKLVEDSRRRVEEVIRRLRELLKRVADELRR

SEQ ID NO: 20023 - protein, 61 aa, Artificial Sequence
  Synthetic
DELEEALRRLKKIVEDLARRNEELLKELRRDSKRLKDEIKRVVDELRDIVRRLKEELDRVK

SEQ ID NO: 20024 - protein, 62 aa, Artificial Sequence
  Synthetic
ERLERRVREIIRRAEELLERSRKRSEEIAREAEKSNRELEDAVRRIIRELEELLEKLERDAR

SEQ ID NO: 20025 - protein, 60 aa, Artificial Sequence
  Synthetic
DEVDKVTRELREIMRKLKEDDKEVLDRLREDSERVERTNREVEKRLEAIIRDLEEKLRRK

SEQ ID NO: 20026 - protein, 62 aa, Artificial Sequence
  Synthetic
ERLKEKVDRIREEAKRLLEELEKHVRDSEREAEDSNRRSRETSEEIIRRLRKKVKELEDKVR

SEQ ID NO: 20027 - protein, 60 aa, Artificial Sequence
  Synthetic
SEVDKVEEELERIVKELKDRDREVLKRLRDDSERLVRELKKVAEELRKIAKDIDERLKEK

SEQ ID NO: 20028 - protein, 62 aa, Artificial Sequence
  Synthetic
ERLKDRVDKIREKARKLLEELKKHVDDSIEEAKRSNEELRKTVEKIIREAEKLLRDLKEAVK

SEQ ID NO: 20029 - protein, 60 aa, Artificial Sequence
  Synthetic
SEAEKVERELDKIIRELKETDKKVLEDNRRVVEKIEREMERVLRELERIMKELKEELDRK

SEQ ID NO: 20030 - protein, 62 aa, Artificial Sequence
  Synthetic
ERLKEKVDEIRKRAEELVKELARHVEKSIRESRELDKRLEEKVKEIIRRARELLEDLRRKAE

SEQ ID NO: 20031 - protein, 57 aa, Artificial Sequence
  Synthetic
SEAEKVRREVEDLIRTLEEVVRKSSEEIKELLRRLREVVERIRDTTRRLIEEIEKKV

SEQ ID NO: 20032 - protein, 59 aa, Artificial Sequence
  Synthetic
REDLERVLKEVREIVKRLLKRLEESLRDVRRIAEELREMLKRSLKRSEEIIRKLLEDVR

SEQ ID NO: 20033 - protein, 57 aa, Artificial Sequence
  Synthetic
DEVDTVDEKVKRLAEELRKRVRESKERTKKLARDLREAVKESLKDSERLAEDLRRKV

SEQ ID NO: 20034 - protein, 59 aa, Artificial Sequence
  Synthetic
REKLERVEREIEKLVREVEKILRDIHRDNERVVREVERRLEEITRRSRELAKRVEDETR

SEQ ID NO: 20035 - protein, 57 aa, Artificial Sequence
  Synthetic
DEVDEVARKVERDAERLEDLNRRSEETSRRLAEELRRLNERSERETERLAEELRREV

SEQ ID NO: 20036 - protein, 59 aa, Artificial Sequence
  Synthetic
KKKLEDILREIEKLIRRVEEISRRILEESKRLADEVRKITKKLHDDNKRLADRVKEETR

SEQ ID NO: 20037 - protein, 57 aa, Artificial Sequence
  Synthetic
REIDEIKERVDRLAEKLRRDMERSTRESRKLVEELKERAKRSKEETTKLAEELRRRV

SEQ ID NO: 20038 - protein, 59 aa, Artificial Sequence
  Synthetic
KEELERILREIKRLMDEVKRILEELLKTNKKLIDEVRKRLEELHKRNRELVEEVARRAN

SEQ ID NO: 20039 - protein, 61 aa, Artificial Sequence
  Synthetic
SEVEAVEKEARELVREDERRDDEIEEDLRRLLEENRRKDDKVEKEVRELLKRLRDKVDDRA

SEQ ID NO: 20040 - protein, 59 aa, Artificial Sequence
  Synthetic
KRDVKRVRDTVRDISRKNNRTTEELLKRVRDISRRNKEITEELLRRIREIAEDLARKLD

SEQ ID NO: 20041 - protein, 61 aa, Artificial Sequence
  Synthetic
SEVEKVEEEVKRLVEENERRVRESSREVEKLLREDAERDERASRELKKLLEKLKRAVDKRA

SEQ ID NO: 20042 - protein, 58 aa, Artificial Sequence
  Synthetic
RAVEKVLRTARKISEDNKRKNDEISERLRRISERNNRESEKLLRDLEKIIEDVERKLE

SEQ ID NO: 20043 - protein, 61 aa, Artificial Sequence
  Synthetic
REVEEVEKKARELVERDERTDERIRKELEDLVRENKKEVKRVRETIERLLRDLKKAVDERG

SEQ ID NO: 20044 - protein, 59 aa, Artificial Sequence
  Synthetic
EEDVKRVEKTVEDISRKNNEITKRLRDTVRRLSEKNRRDLEKALEDLKRIVDDVRRKIT

SEQ ID NO: 20045 - protein, 61 aa, Artificial Sequence
  Synthetic
SEVEEVEKEARELVKRDEDRDKEIEDKLRELVERNRRLVRKSSEELKKEIKRLKDEVDRRA

SEQ ID NO: 20046 - protein, 59 aa, Artificial Sequence
  Synthetic
KEKVEKVLKEVRDISRENNKTTDTLEKEVRRLSEENKRRNEEVTRRVRKILEDVERKAR

SEQ ID NO: 20047 - protein, 61 aa, Artificial Sequence
  Synthetic
KEVEDVEEEVKKLVEENKKAVDDSREEVRKLLEENKKAVDDSRKEVEKLAKKLKEAVDRRA

SEQ ID NO: 20048 - protein, 59 aa, Artificial Sequence
  Synthetic
KEKVKRVLDEAKKISDDNKRKNEEVSKELEKISRDNLKLNEDITREIREIVERVDERLE

SEQ ID NO: 20049 - protein, 61 aa, Artificial Sequence
  Synthetic
SEVEKVEKDLRKLIKDNRDSVRRVKEEAEKLVEENRRSVEEVRRTIKELLERLEKLVRDRG

SEQ ID NO: 20050 - protein, 59 aa, Artificial Sequence
  Synthetic
KRLVDKVRRELEKILRDDNRIIKEVLDTVRRLSEDNLKKVKDVLEELTRIAEEVRERAR

SEQ ID NO: 20051 - protein, 56 aa, Artificial Sequence
  Synthetic
SKVEDLLEKLERELEKNRKRTKELLKRAEESSEDIREKVRELRERLERLIEELERR

SEQ ID NO: 20052 - protein, 59 aa, Artificial Sequence
  Synthetic
DKLLEDLERLVRRVLDEARKINEELDKRVKDSVREVEKRLRELEEEVKRIIEEVEKKAQ

SEQ ID NO: 20053 - protein, 56 aa, Artificial Sequence
  Synthetic
EELERLARIVDEAHKRSRDLLETSKREVEDAIDEIRARLEDSRRLVEEVTDEIRRI

SEQ ID NO: 20054 - protein, 58 aa, Artificial Sequence
  Synthetic
ERLKELKKRLRDLIEENDRRAKESTKKIRDLAKELRERARRTEEEIKTLMKELEDRMK

SEQ ID NO: 20055 - protein, 56 aa, Artificial Sequence
  Synthetic
KELEDLRREVEEIHKTSERLLRESDKLVEEAIRRIEELLERSKDTVTKAADEVRKA

SEQ ID NO: 20056 - protein, 58 aa, Artificial Sequence
  Synthetic
ERLKKLKEDVKRLIEENRKRAEDTKRKIEEEIRRLKEEADRTSEEIKKRADDLRRRAD

SEQ ID NO: 20057 - protein, 60 aa, Artificial Sequence
  Synthetic
DELEEVDKLVKKVHEDSRKLIEDVDRKVREVVERSDRIIETVEELVERVITEVEDMLRKG

SEQ ID NO: 20058 - protein, 58 aa, Artificial Sequence
  Synthetic
DRLRKVEKRIEDLARENEKRNRDLERKIEKLADESRKKNEDLKKRIEDLAKRLKDEAD

SEQ ID NO: 20059 - protein, 60 aa, Artificial Sequence
  Synthetic
SSLETVREEVRRVKEESDRIIKEVRDRVEEVHKTSKRIIEEVEERVERVIREVREMLRRG

SEQ ID NO: 20060 - protein, 58 aa, Artificial Sequence
  Synthetic
ERLDRVVEDIRRLAEESRRKNEELRKEVEELVKRNKELNEKLKKKVKELAKELRDEAK

SEQ ID NO: 20061 - protein, 60 aa, Artificial Sequence
  Synthetic
DDLETVKRLVDEVIRTSEELIDTVRRLVEEVHRESERILKEVKKEVERVIREVEKLRRKG

SEQ ID NO: 20062 - protein, 58 aa, Artificial Sequence
  Synthetic
KDLERVRKRIEDLAKELERRNRELEEDIKRLAKENEELARELKKEIETLAKRLEDEDR

SEQ ID NO: 20063 - protein, 60 aa, Artificial Sequence
  Synthetic
SSLEEVDRRVKEVHKESDKIIREVDKRNKEVNRRSEEIIEEVEKTVEEVAKTVDDMLRRG

SEQ ID NO: 20064 - protein, 58 aa, Artificial Sequence
  Synthetic
RELKRVKEEIDRLVEEDKEKNERSDKRAKETVDKNKKLNDDLEEKIRRLAEELRRRKK

SEQ ID NO: 20065 - protein, 60 aa, Artificial Sequence
  Synthetic
SSLKEVERLAKELHEKSERIIREVEKLSRELHKTSEKIIRDVARRVKKLIDDVREVITRS

SEQ ID NO: 20066 - protein, 58 aa, Artificial Sequence
  Synthetic
EELEKLRKRVEDLVRRNEEENKRTLRESEELVKENRKRNKELRDRVEKLVEELRRELK

SEQ ID NO: 20067 - protein, 60 aa, Artificial Sequence
  Synthetic
KKLEDVKELVERLHRESEEIIRDVERRSRELAETVKKILEEVRRLSKKLVDEVREVIKRS

SEQ ID NO: 20068 - protein, 58 aa, Artificial Sequence
  Synthetic
KDVDRVDREVEELVKENRERNKDTKRESERLAEKLRRDVEKSLRDSERLVKELRDRLR

SEQ ID NO: 20069 - protein, 60 aa, Artificial Sequence
  Synthetic
KKLEDVKRLVDKLVTESEDIIRRVTEESRRLVEESRRVIEEVKKLSEELVRRVEKVIREK

SEQ ID NO: 20070 - protein, 58 aa, Artificial Sequence
  Synthetic
ERVKKVKRDVEKLVRDSRELNKRTREESERLVEESERLNEESRKESERLVRELREKLR

SEQ ID NO: 20071 - protein, 60 aa, Artificial Sequence
  Synthetic
SKLEDVERKVRELVRRSKRVIKEVERLVRELHKRSEDVLRKVKKDSRDLAREVKDVIRRK

SEQ ID NO: 20072 - protein, 58 aa, Artificial Sequence
  Synthetic
KDVDKVRRDVEDLVRESRELNKRLKREVEELAKENRRRVEESRRESEELAKELRERLK

SEQ ID NO: 20073 - protein, 60 aa, Artificial Sequence
  Synthetic
SSIEKVLRELEDIVRKIEERNKKSHDEVRRVVEEIKRRVKKSHEDVRRVVEKIDEDIKRK

SEQ ID NO: 20074 - protein, 58 aa, Artificial Sequence
  Synthetic
DEIRRVKERLDELIRRLEELIRRNVTELKRLIDDLRRLVEENVRRLKELIDKLREDVK

SEQ ID NO: 20075 - protein, 60 aa, Artificial Sequence
  Synthetic
SEIERVLEELKKIVRRIKEKLKESHERVREVVERLKRRNEKSHRDVRRVAERIRREIEKK

SEQ ID NO: 20076 - protein, 58 aa, Artificial Sequence
  Synthetic
KDIREVKKEADRLIKELRDLIETNEREMKKLIDELEELIRDNARRLEELIKRLEEEVR

SEQ ID NO: 20077 - protein, 61 aa, Artificial Sequence
  Synthetic
SELEKVLEEAKRVVDEIKKKLEESHKDNRRTVEEIKRRNKESHERLKEAVDKLKAEIEKKR

SEQ ID NO: 20078 - protein, 58 aa, Artificial Sequence
  Synthetic
DRIREIAEELDKLIRELEKLVKRNADESDKLLDELRKLVEDNEREAERLIKELEDEAR

SEQ ID NO: 20079 - protein, 61 aa, Artificial Sequence
  Synthetic
SEIERVLRELEKIVEELKRENEDVHRRVREVVKKLKDENRKSHEEVKRMVDKIREEIKRIR

SEQ ID NO: 20080 - protein, 58 aa, Artificial Sequence
  Synthetic
DDIRRAAEKVDKLIKELEDLIRRNAEELRKLIEELEELIRRNRERLKRLIEDLKRAVE

SEQ ID NO: 20081 - protein, 57 aa, Artificial Sequence
  Synthetic
SEMERVEEEIRRLLKELDKKARDVHEADKELVKENRKLADEVERDLRRLLEELRRDV

SEQ ID NO: 20082 - protein, 59 aa, Artificial Sequence
  Synthetic
KKAIEDVLRKIKKLVEDLKRRIEEVLRESEALNEDTKRLIEEVLRDVRRTIDRLKKEAK

SEQ ID NO: 20083 - protein, 57 aa, Artificial Sequence
  Synthetic
SDMDRVEKELEELLRENEELAKDIHRRDKELLEENRELVRRAEEELRRLLEELARDV

SEQ ID NO: 20084 - protein, 59 aa, Artificial Sequence
  Synthetic
KEVIKDVLRKVRKINKETKELLRTVLEKSEKLNRDTKKRIKDVLEKIKRLIDELRERAR

SEQ ID NO: 20085 - protein, 57 aa, Artificial Sequence
  Synthetic
KEREDIEDRVRKLIEELEESVRRSNETVKKLLRELEKLLEDSNRSVEELARDLRRKV

SEQ ID NO: 20086 - protein, 55 aa, Artificial Sequence
  Synthetic
EKVLRKVEKVVEDLKRHNRKVNEEIKRVAEKLKRELEEVNKDIRRMARKLEEEVR

SEQ ID NO: 20087 - protein, 57 aa, Artificial Sequence
  Synthetic
SEAEKIAEDVERLARDLERLLKESNDTVRTLIEDLRRSVEETAKEVRDLIEDLRRRV

SEQ ID NO: 20088 - protein, 55 aa, Artificial Sequence
  Synthetic
EEVLKELKKVADELRRILEDVNRRIRKVVDDAREHNKKVVEDVRRVAKEARDRVR

SEQ ID NO: 20089 - protein, 59 aa, Artificial Sequence
  Synthetic
DEVEELERRIEKLAREVKKEIKDALRRNKRLIDEVKKIIEDVNRENRRLMEEVKRLIDA

SEQ ID NO: 20090 - protein, 58 aa, Artificial Sequence
  Synthetic
DELRRIAKRVEDLAEELKRLLDKSRETSERLVDELRKLLRESNETSKELVKRLDDRRK

SEQ ID NO: 20091 - protein, 59 aa, Artificial Sequence
  Synthetic
SEAEKLLKEAKRLADEAKKIIKRAHEENKRAADEAKKIIEEANRENEKLAREAKKLIDA

SEQ ID NO: 20092 - protein, 58 aa, Artificial Sequence
  Synthetic
DEAREIEKRVRELAEELKKLARESNEASKELAKELKELAERSNKTSEDLAKELEDRAR

SEQ ID NO: 20093 - protein, 59 aa, Artificial Sequence
  Synthetic
SEVERLLEEIKELAKRVKDIIKEVNKENKRLVDEVKDRIRKINEDNNRLVETVKELIRK

SEQ ID NO: 20094 - protein, 58 aa, Artificial Sequence
  Synthetic
KELERIEREVERLADELRKLLEESNESTERLAEELERLVRESERDSRRLAEELKRRLD

SEQ ID NO: 20095 - protein, 60 aa, Artificial Sequence
  Synthetic
SELEKLKEEIKKLADDVKRIIKKVLDENRKLVDDVKKIIKKVTEENRKLVREVAELIKAG

SEQ ID NO: 20096 - protein, 58 aa, Artificial Sequence
  Synthetic
KELEEIDKDVDRLIEELKRLLEDSNRDTERLAKELKDLLDESNKDSRRLAEELKRRTD

SEQ ID NO: 20097 - protein, 59 aa, Artificial Sequence
  Synthetic
REVDELRKEIRRLAKEVKDIIKKATERNEELVRRVKEIIKEVNRRNRKAAEEVKELIRA

SEQ ID NO: 20098 - protein, 58 aa, Artificial Sequence
  Synthetic
EDLERIRKEVEELARELEKLLEESNRETKRLARELEKLLEDSRRSTEELAKELEEAER

SEQ ID NO: 20099 - protein, 57 aa, Artificial Sequence
  Synthetic
REAEEVDKEIKKIVRDVRERIRKLNEDNRRIAEKVKREIEELNKRNRDTAKEIEKRG

SEQ ID NO: 20100 - protein, 58 aa, Artificial Sequence
  Synthetic
DELREIERDVDRLVEELRKLVEDSRRTTKRLVEELDELVETSDRETEKLVRKLRERER

SEQ ID NO: 20101 - protein, 57 aa, Artificial Sequence
  Synthetic
SDLERVLREIKKEVDDVKRLIRELNERNRTIVEEVKKLIEKLNRDNERIVREVKKRG

SEQ ID NO: 20102 - protein, 58 aa, Artificial Sequence
  Synthetic
EEVKRIEDEVRKLVRELEELLKRSDDDTERLVEELKELLKRSEKKTRELAKELRDRRR

SEQ ID NO: 20103 - protein, 57 aa, Artificial Sequence
  Synthetic
SEVDEVLKRIKEEVDRVKEEIKRLNKENNDIVRKVKKEDRDIVETIRKIAEDVKRRG

SEQ ID NO: 20104 - protein, 58 aa, Artificial Sequence
  Synthetic
DELREIDERVEKLVKELEETLRESEKDTKRLVEELEKSLKETEDDVRRLVKELKDRDD

SEQ ID NO: 20105 - protein, 57 aa, Artificial Sequence
  Synthetic
SKLEEVLRDIRRIVEEVKDEDRRIVEEIRKIAKDVKEKIKELNRENNRIVREVKERG

SEQ ID NO: 20106 - protein, 58 aa, Artificial Sequence
  Synthetic
DELRRIDEEVEKLVKELEKSVEDTKREVDRLAKELEDLVRDSKRDTDRLVKELKDRTD

SEQ ID NO: 20107 - protein, 57 aa, Artificial Sequence
  Synthetic
REVEEAADDLRRLIEENERSVRESKRTLEELIKENEDSVRRSEKSLRDLIRELEEEG

SEQ ID NO: 20108 - protein, 56 aa, Artificial Sequence
  Synthetic
VEELLKRVRDVSEESKRLDRKLNEDVKEVSKDSKRRDRELNERVRKVAEDVKETER

SEQ ID NO: 20109 - protein, 57 aa, Artificial Sequence
  Synthetic
SEVEEAAERAKRLIDKLKESADRSEKTARDLIRDLNRSTEEIAREARKLIEELKKAG

SEQ ID NO: 20110 - protein, 56 aa, Artificial Sequence
  Synthetic
VKKALEEVRRAAEEAEKADRKLNKEVKEAADRARELNKKLADEVRKAAKEAKEKAD

SEQ ID NO: 20111 - protein, 57 aa, Artificial Sequence
  Synthetic
SEVEEAAKEAKRLIEELNRSTEKIARDAKKLIEELRKSAKESADSARKLIEELKKRG

SEQ ID NO: 20112 - protein, 56 aa, Artificial Sequence
  Synthetic
VKKALEDVKRAADKAKEDNKKLLKEVEDAAREAKRADRELNKRVKEAADKAKEEAN

SEQ ID NO: 20113 - protein, 61 aa, Artificial Sequence
  Synthetic
DELEEVRERIERLIRRSEELNKKVEKENKELVDRSREINRRVLDEIRRLIREVERILEEEG

SEQ ID NO: 20114 - protein, 59 aa, Artificial Sequence
  Synthetic
EEEVRKLEEEVRELIKKLERSNRELNKETEKLVEDLKRSNKELEEDVERLARKLEEELR

SEQ ID NO: 20115 - protein, 61 aa, Artificial Sequence
  Synthetic
KELEEVEKRIEELARRVEERIKKVIEDNRRLVEESEKINEEVRREVKRLIDEVKEIIRRKG

SEQ ID NO: 20116 - protein, 59 aa, Artificial Sequence
  Synthetic
EREVRRLEERVEELARRLEELLKESNTRSEKLARDLEKSNEDLEREVEELAKRLEEELK

SEQ ID NO: 20117 - protein, 61 aa, Artificial Sequence
  Synthetic
DSVREVAERIDRLVKESERINREVIETNRRLFKESEKINDKVRKEIEDLIRRVKEIIDRDG

SEQ ID NO: 20118 - protein, 59 aa, Artificial Sequence
  Synthetic
EEDLRRLKKKVDDLARKLEESNRRSNEDSKRLARELEESNKDLKRRVDELARELEERLK

SEQ ID NO: 20119 - protein, 61 aa, Artificial Sequence
  Synthetic
DELKEVEERIERLIRESKRVNEEVKETNRRLVRESKEINKRVHDTVRRLVEEVRRIIDERG

SEQ ID NO: 20120 - protein, 59 aa, Artificial Sequence
  Synthetic
EKEVRRLREEVEKLAKELKRSNDESNKESERLVEDLKRSNTENSKAVEDLARELKERLK

SEQ ID NO: 20121 - protein, 60 aa, Artificial Sequence
  Synthetic
RSVEELKKKVEDLVRKLEELVKDSKRESKELVDDSERLVKELEDDVRRLVRELRERVRRR

SEQ ID NO: 20122 - protein, 59 aa, Artificial Sequence
  Synthetic
ERIIKRIEEEIEELIRRVEEIIRKVIKENRELVERDREIIKTVLERIRELIKEVTDRIE

SEQ ID NO: 20123 - protein, 60 aa, Artificial Sequence
  Synthetic
SEVEKLEEEVERLVRDSERLNKRLEDRVKKLVEDSERLVRELEKTVRDLVKKLKDDVRRR

SEQ ID NO: 20124 - protein, 59 aa, Artificial Sequence
  Synthetic
ERIIRRIRKEIKDLFDDDKRISEEVERRIERLFKEDKKIIEDVEREIRRLIKEVEDRIR

SEQ ID NO: 20125 - protein, 60 aa, Artificial Sequence
  Synthetic
DDVERLERRVRELIKESEKLVDDLRKDVERLVKKSRDLNERLREDVERLVKELEDRVRKR

SEQ ID NO: 20126 - protein, 59 aa, Artificial Sequence
  Synthetic
KEIIDKVRKEIEDLVRKDKEIIDEIRKEIRRLVEEDEEISRRVEETIRRLIREVAERIR

SEQ ID NO: 20127 - protein, 57 aa, Artificial Sequence
  Synthetic
SEVDELRKRVEELVRRSRKLVEEHRRKVRELVEESRRLVEELRRDVERLVKKLRDEL

SEQ ID NO: 20128 - protein, 60 aa, Artificial Sequence
  Synthetic
ARDLIEEVRERADRVAKKDEDVIRKSEEDTERVVREDKKIIDRVRKDVEEVIRRVEEETR

SEQ ID NO: 20129 - protein, 61 aa, Artificial Sequence
  Synthetic
STLERLTEDVKRVIREVEEVIKKLKEEVDKSLEDVRRKIEESRKETKRVIDEVKRRIKDKR

SEQ ID NO: 20130 - protein, 56 aa, Artificial Sequence
  Synthetic
VEELAKRLEELIRRLEELVDRLRKELKESIEEIRKRVRDHKEESKRLIRELDEEVK

SEQ ID NO: 20131 - protein, 61 aa, Artificial Sequence
  Synthetic
STLERLDEDVKRVAREDTELIKESEERTKKSADDVRKKIEDSRRTTDKVVTDVEDIIEKKR

SEQ ID NO: 20132 - protein, 56 aa, Artificial Sequence
  Synthetic
VEELAEKLKELLKDSERRVDEHRRKSEESTREIEELVKRHEDRSRELIKRLDEEVR

SEQ ID NO: 20133 - protein, 60 aa, Artificial Sequence
  Synthetic
SLLEKLRRRVDEVIKRDDELIEESKRRTDEALKRVEERIRKSLEETKEAVDRVRDIIRRV

SEQ ID NO: 20134 - protein, 56 aa, Artificial Sequence
  Synthetic
VDELRERLRKLLEDSEEKVKRHKDESDKLIKDIEDKVKRHEDESRRLIRELREELK

SEQ ID NO: 20135 - protein, 56 aa, Artificial Sequence
  Synthetic
SEADELRKKLEETNKDIKRRVEELKRRLEESNERIEELVRRNEKKSKDLLDDVRRR

SEQ ID NO: 20136 - protein, 59 aa, Artificial Sequence
  Synthetic
EEVLKRLDKKLEDSRRDVERVEKEVEELLRESEERVKRVVETVDKTDEEVKKDVDDKRR

SEQ ID NO: 20137 - protein, 56 aa, Artificial Sequence
  Synthetic
SEAEDLEKKAEDTNREIKKIAEELKKHAEDTNREIEKKVEDLRREAERILREVARK

SEQ ID NO: 20138 - protein, 59 aa, Artificial Sequence
  Synthetic
EEVLERLERKLRESKREVDRLAEKIKKLNDDSRKRVDEVVERVRRLLEDVKRKVDEARR

SEQ ID NO: 20139 - protein, 58 aa, Artificial Sequence
  Synthetic
DEVERLEEDVERSIRDSEKVVRDSERRVRESNEEIRRLIEESDKDVKRLIDEATKKSG

SEQ ID NO: 20140 - protein, 59 aa, Artificial Sequence
  Synthetic
REVIRELKERLKEISDRLKKRSEKSVRDLDDISRKIVRRSEDTVRKLREIARRLDERTK

SEQ ID NO: 20141 - protein, 58 aa, Artificial Sequence
  Synthetic
REKDELEEAVRRSNKRLKDILEKSRKDVEESIKRSEELLKRSDDEARKLIEEMTRKSG

SEQ ID NO: 20142 - protein, 59 aa, Artificial Sequence
  Synthetic
RKVIEDVLRELKKITDEIEKESRRSLDELRRISKELEDDSRRTLEELKKIVKELKDRET

SEQ ID NO: 20143 - protein, 58 aa, Artificial Sequence
  Synthetic
DEDRRLEEEVRKSIEESERVIERSEEEVRRLIEEARTLLEDSRRKVEDLLREMTRRAG

SEQ ID NO: 20144 - protein, 59 aa, Artificial Sequence
  Synthetic
REVIEKVLRELREISERLKRESERSLRELEEIARDLLRRSRRTVEELRRIAEELVKRAK

SEQ ID NO: 20145 - protein, 60 aa, Artificial Sequence
  Synthetic
DELEEVLERIEREIRRVSERSEELSRRNEKIIREVEEESRRILEEIKREIDEVKKRAERV

SEQ ID NO: 20146 - protein, 62 aa, Artificial Sequence
  Synthetic
EEAKKLVREVEETVRKLVEELREMNKRHEDKNRELSDRLREIDKRLEDEVRKLVEELRKKVE

SEQ ID NO: 20147 - protein, 60 aa, Artificial Sequence
  Synthetic
DELEEVEKEMERIIREVERKLREVNERIKEIIERVIRESKEILDELKRIIDEVKKRAERV

SEQ ID NO: 20148 - protein, 62 aa, Artificial Sequence
  Synthetic
EDAERLVRELRKKVEELKRRLEELNRDDKRTIDELVKTLDKIDRELRKTVEDLVRDLERDVK

SEQ ID NO: 20149 - protein, 57 aa, Artificial Sequence
  Synthetic
SKVDEVLKDVRRISEESERRIRELNDRSRKISKESEDRIRELLRRLEEIVERLKRTN

SEQ ID NO: 20150 - protein, 56 aa, Artificial Sequence
  Synthetic
AEELRKEVERLIRENEELVERHRKTVEELRRRNEELVKRLEDTVRKLEKELKEEAD

SEQ ID NO: 20151 - protein, 57 aa, Artificial Sequence
  Synthetic
SELDRAADRLRKISKRSEEEIRKLNEEVKKISKESEEKIRRLNEEVKRIVEEVKRRN

SEQ ID NO: 20152 - protein, 56 aa, Artificial Sequence
  Synthetic
AKELAEIVEKLIRDNRRLVEEHEESVRRLEDRNRKLVEDHERTVRKLIKELRETRR

SEQ ID NO: 20153 - protein, 57 aa, Artificial Sequence
  Synthetic
SELEKLLRDLEEIARKVEEEIRTLNEDVKRISKESKERIDRLKEELKKIVDDLKKRR

SEQ ID NO: 20154 - protein, 56 aa, Artificial Sequence
  Synthetic
AEDLRREVERLIRELRKLVREHERSVRKLIEENRRIVRELEELVKKLRKELEDTLR

SEQ ID NO: 20155 - protein, 57 aa, Artificial Sequence
  Synthetic
SELEEAERRLREIVRKVEEDSRKLNEELKREVDEVRRRSEELNKRVRDEAERVRKEN

SEQ ID NO: 20156 - protein, 58 aa, Artificial Sequence
  Synthetic
EKAEDLARIVKKLVEDLKRLNKRHKESVDELVRRLEELDREHERTIRRMIEELRETER

SEQ ID NO: 20157 - protein, 60 aa, Artificial Sequence
  Synthetic
KEVEKLLEDLKEVARRVSEEIKRLLKELKEVSKRSEDRIRTSLERVKKVVEDVLREADEF

SEQ ID NO: 20158 - protein, 55 aa, Artificial Sequence
  Synthetic
RELKEEIEKLLRRLRKLVKELKEEIKKIVDRNRKLVREHEARSEELKEEIRREVE

SEQ ID NO: 20159 - protein, 60 aa, Artificial Sequence
  Synthetic
SEKEELLKRVAEVSKKSKDRARELNERLKKVVDEVLETIRKLNEDLKRVVERVKEKIKDK

SEQ ID NO: 20160 - protein, 55 aa, Artificial Sequence
  Synthetic
KELRKEAKRNVDENREVVKENKRTTEKLLRDLDRILKENKRTVEKLVRELREEVR

SEQ ID NO: 20161 - protein, 60 aa, Artificial Sequence
  Synthetic
DEKERLLEDVKRASEDSERRIRELNDRVRRVSEESERRIRKLNKELRDEVEKVLREIDRI

SEQ ID NO: 20162 - protein, 55 aa, Artificial Sequence
  Synthetic
DELREEIEKNLRRNEELVKKNKKDSEDNKRDNDRLVKENEKTTEDLLRRAKEEVD

SEQ ID NO: 20163 - protein, 60 aa, Artificial Sequence
  Synthetic
DETETVEKKLRDVLERVKKDSEDSREELKRVHKRSEELSRRSNKELDDVLDEVRRIIERS

SEQ ID NO: 20164 - protein, 55 aa, Artificial Sequence
  Synthetic
EELKKRLDEMRKTIEKLLEDTKEELRELIERNKKLLDDTARRAEEIIKEIEDRSK

SEQ ID NO: 20165 - protein, 60 aa, Artificial Sequence
  Synthetic
SREEKVLEDLDRVLKRVTDLSKESLDEVERVHEESERLIRDSNRVLRDVLEKVREIITKS

SEQ ID NO: 20166 - protein, 55 aa, Artificial Sequence
  Synthetic
KELKDRAREVIRRIEKLVEDTERALRDLIRKNEELLKRTEEELKRAEEDIRRKSK

SEQ ID NO: 20167 - protein, 61 aa, Artificial Sequence
  Synthetic
SDAERVLREIERLLEELKELVERVVRKSEELLRRAKRVNEEVNREIKKLADELEEVIRRKG

SEQ ID NO: 20168 - protein, 59 aa, Artificial Sequence
  Synthetic
KEVVDTLRRVVEEITRELEELLERLRRVSEEIRRTLEELLERTRRLVEEIERKLREALK

SEQ ID NO: 20169 - protein, 61 aa, Artificial Sequence
  Synthetic
SELDDVRRKIKRLIDELKRVNEKVNKDSEDLVREVERVNRDVNRRVKELLEELKRVIDERG

SEQ ID NO: 20170 - protein, 59 aa, Artificial Sequence
  Synthetic
EEMVERLRREVEKLERELRELLRRTEENSRRAKERLEDLLRRTRELVKRIEERLREELR

SEQ ID NO: 20171 - protein, 60 aa, Artificial Sequence
  Synthetic
SDVERLKKRVDELAERLKRLDEELKKEVDRIETELRELLKRHEDRNRDISRRLAELLKDA

SEQ ID NO: 20172 - protein, 59 aa, Artificial Sequence
  Synthetic
KEIVERILEELDRLMEKVERVSREILKTIEKLARDIKKRIEEVTRESERLAREVEEALR

SEQ ID NO: 20173 - protein, 60 aa, Artificial Sequence
  Synthetic
DEVETLEKRVRELERRLEELNKELREEVRKIVERAKELDKRHKDDNERIEKELRELLRDV

SEQ ID NO: 20174 - protein, 59 aa, Artificial Sequence
  Synthetic
DEIAKRILDEIDRLMEEAEKVTRDILRKVEELLRRVEDASRRVTKKSRELLKKVKEDLR

SEQ ID NO: 20175 - protein, 60 aa, Artificial Sequence
  Synthetic
SEVETLEKAVRDIVERLKDLNRRLEKEVRDAVKRLRDLLREHEKRNREIAKDLTDKLRKA

SEQ ID NO: 20176 - protein, 59 aa, Artificial Sequence
  Synthetic
KEAATDILRKAEELADEVRRATEEIAKEIRRLVKEVEEVIKDVTRKSDELLKRVADAAK

SEQ ID NO: 20177 - protein, 60 aa, Artificial Sequence
  Synthetic
DELETLADVVRKLIERSRDLLRRHEKRNDEIKKRLDELDRELKERAEEIKKRLEELLRRR

SEQ ID NO: 20178 - protein, 60 aa, Artificial Sequence
  Synthetic
AEDVVRDVLRKAEKVVEEDERLIRRVTEESDRVLDRVEKETKKIVDEAKRMLREVEERIR

SEQ ID NO: 20179 - protein, 60 aa, Artificial Sequence
  Synthetic
SLIDELRERVKEIKKRSEELLKRHEDENRRIVKRSRELLKKLRDVVRDIIRELRKELEDD

SEQ ID NO: 20180 - protein, 60 aa, Artificial Sequence
  Synthetic
AEEVVRRVLKEAEDLLRKDEKILRDVTRRSEKALREDEELAKRVLDEMRKVLEDVKRKSK

SEQ ID NO: 20181 - protein, 60 aa, Artificial Sequence
  Synthetic
EELERLAESVRRIKERLKKLDREHEERNKRIVETSRKLLEELEREVRKIEEDLKRLLDER

SEQ ID NO: 20182 - protein, 60 aa, Artificial Sequence
  Synthetic
AEEVVRDILRRLEELMRRAEEVTKKLTDDSRRLLKEDEDLVREIEERLRRLLKEVKERVD

SEQ ID NO: 20183 - protein, 60 aa, Artificial Sequence
  Synthetic
DEDRDVKREVKKVHEDSARTVEKLDREVEKVHEESERTVRKSEKEAKEVLDRVKDIVKKK

SEQ ID NO: 20184 - protein, 55 aa, Artificial Sequence
  Synthetic
EELKEDLKRILKENEDLVRELEKKLDDIMRENEELVREHEEKSKRIVRELEEEVR

SEQ ID NO: 20185 - protein, 60 aa, Artificial Sequence
  Synthetic
EEKERADRKLEEVHKESKKTVEDSDEALERVHRESKRTVEESRKTLEDVVREVKRIVEEK

SEQ ID NO: 20186 - protein, 55 aa, Artificial Sequence
  Synthetic
KELRRKVEEILKRNEEEVRKHKEKSKKIVEDNRRLVKRHKEESEEVVRDAAREVK

SEQ ID NO: 20187 - protein, 61 aa, Artificial Sequence
  Synthetic
DEDREALKEVEDVHRRSEEKVRESRRRAEEVHKESKKIVDELRRRSEESLKRVEDEVRKKR

SEQ ID NO: 20188 - protein, 55 aa, Artificial Sequence
  Synthetic
EELKDELRKIVETNRELVRRHHETVKKIMEENERLVRELEKRLEEADRKLEEEVR

SEQ ID NO: 20189 - protein, 61 aa, Artificial Sequence
  Synthetic
SLEEEVRRIVDDIRRTNKELLDRSARRAEEIERRLEELLRRSRERADRIREEMRRMLEKAG

SEQ ID NO: 20190 - protein, 59 aa, Artificial Sequence
  Synthetic
KKTVDDVLKRLKEENDRSREEIKRSNEESDRVLDEVRKRSEDSNRRLDKIVDEAKKELK

SEQ ID NO: 20191 - protein, 57 aa, Artificial Sequence
  Synthetic
DELEEVLERLREIAERVIKESKEINDELKRSSERSKRESDKVNKRMREIMKELKDRG

SEQ ID NO: 20192 - protein, 59 aa, Artificial Sequence
  Synthetic
EEDVRRIRKLVEDIARRLKEIIERNRESVRKSREENKKSIEENRRSVKKIADEAREDAR

SEQ ID NO: 20193 - protein, 57 aa, Artificial Sequence
  Synthetic
EETERLIEAVKRIAEEVRKTIERLMERVEKTTRESEELNRRLNRELDREVEEVERAN

SEQ ID NO: 20194 - protein, 55 aa, Artificial Sequence
  Synthetic
EELEKVVREVAERLDRLLKALRDLVEESARRNKRLIEETDRRIKEIAERLKRTSD

SEQ ID NO: 20195 - protein, 60 aa, Artificial Sequence
  Synthetic
SEAERLLEELERSTRESAKRIRDLADKLRRSSEESVKDIERLTKELEEAVRRVLDKIRKK

SEQ ID NO: 20196 - protein, 59 aa, Artificial Sequence
  Synthetic
EEVVRRLAKVVEESRRTNEKLLRDLEKLVEDSKRRNDELLEKNARRIKEVEDELKRETK

SEQ ID NO: 20197 - protein, 60 aa, Artificial Sequence
  Synthetic
KDAEDLLRRLRESTKRSEDLVRKLLEELERSSRESEKLIRELTDRLDKVVKDVERRIREK

SEQ ID NO: 20198 - protein, 59 aa, Artificial Sequence
  Synthetic
EEVVKRLEKAVKESEDRNKELLDRLRKRVEDSKRRNDKLLKENRKRIEEIKRRLDELLR

SEQ ID NO: 20199 - protein, 60 aa, Artificial Sequence
  Synthetic
SKAEKLLRDLEKSTEDSERRIRELLERLRESSRTSEELAKRLEEEVERATREVADKIRKK

SEQ ID NO: 20200 - protein, 59 aa, Artificial Sequence
  Synthetic
KEVVDRLREIVERSREKNRKLLEDLRRAVEESKKRNEEVLRKLKKKVEEIEEELKERLR

SEQ ID NO: 20201 - protein, 60 aa, Artificial Sequence
  Synthetic
SEIEELLKTLKRSTEKSEEDARRLLEELTRSSEESVKRLRDLTERLKEVAKEVIERIRRR

SEQ ID NO: 20202 - protein, 59 aa, Artificial Sequence
  Synthetic
KKVVDRLKRMVDESRKRNEELLKRLEKRVRESRKRNDELLEENKRVIDKIREELERLRK

SEQ ID NO: 20203 - protein, 60 aa, Artificial Sequence
  Synthetic
SLLEEIEELVRRAIDTVRRSSEELKRLVDRVNETNKRSTEELRELAERVDRRLDKLLKEI

SEQ ID NO: 20204 - protein, 59 aa, Artificial Sequence
  Synthetic
RELVEKLKRELRRILEEVRRLNEELMKEIRDTNRKSEKLNRDLKEEIKKILEDVEREVR

SEQ ID NO: 20205 - protein, 60 aa, Artificial Sequence
  Synthetic
DEAEKLKERLKRVLRRVREINRKLLDELRKSNEKVRRINKRLKEELKRVLDEVEKRVRED

SEQ ID NO: 20206 - protein, 59 aa, Artificial Sequence
  Synthetic
EKLVREIEEMVRRLKEEAEKLSEEIRKIVRESRETLKKLSDEVRRLVERAEEKARKDTK

SEQ ID NO: 20207 - protein, 61 aa, Artificial Sequence
  Synthetic
KEDDDLRREIERLLRELEKMNRKVLEDARRLLEELRRVNKEVAERIKDLERRLKDVVEKKG

SEQ ID NO: 20208 - protein, 55 aa, Artificial Sequence
  Synthetic
ERVKEEVDEIRDRLRKSNETLREIVRRIEEDLRKSDRELEELVERIEKRLRELVR

SEQ ID NO: 20209 - protein, 60 aa, Artificial Sequence
  Synthetic
KLVEEVKRLIEESARKNEELIKEVEKEIRRSRKRDKELIEEIERLIREVKKRLEELLTEK

SEQ ID NO: 20210 - protein, 62 aa, Artificial Sequence
  Synthetic
EEAEELVRRVKEEIKRSTTESEKLVKEVKDRARKSHEDSERLAREVLKEIRRLLEEVEKDVR

SEQ ID NO: 20211 - protein, 60 aa, Artificial Sequence
  Synthetic
KEVEDVKELIKKVNEEIKKIHERSNEEIKRVNEELRKIIKKVKDDLRRVLEEIERLSREG

SEQ ID NO: 20212 - protein, 59 aa, Artificial Sequence
  Synthetic
EDLLREAEKLVEDSRRSSEELVRRDKKLVKESRETSERLVRDLERLLREIEKRVREEAT

SEQ ID NO: 20213 - protein, 60 aa, Artificial Sequence
  Synthetic
SEVETVAELIKDVNRRIREEVEEVKRRIEELNDRNRKIAEEVKERIRRVEDEIREARKRG

SEQ ID NO: 20214 - protein, 59 aa, Artificial Sequence
  Synthetic
DELLTRIDRLVKDSERSSRKLVRELEELVRRSEEETEKLVRELERLVTEVARKVDEEAT

SEQ ID NO: 20215 - protein, 60 aa, Artificial Sequence
  Synthetic
KDVEEALETLKRILDRVAKDNEDLIRELRDINRKITKENEDLIRDLERILREVEEEVKRR

SEQ ID NO: 20216 - protein, 59 aa, Artificial Sequence
  Synthetic
DELRRRLEALVEDVRRTLKELIEKTEKVVKEVEDNLRRLLKRTEEVVREVEKKLEEDRR

SEQ ID NO: 20217 - protein, 60 aa, Artificial Sequence
  Synthetic
SEVEKVLEDLKRILEEIARRNEELNERLERINEEITRRNEKSNEETKRVLDKLADDVRKR

SEQ ID NO: 20218 - protein, 59 aa, Artificial Sequence
  Synthetic
EELERTLEKLVDEVRKRLKELLDRSRELVKRVRENLERLEEDTRRLVERVRRELEKLRK

SEQ ID NO: 20219 - protein, 60 aa, Artificial Sequence
  Synthetic
DEAEKVKRDIEEILKRVAEELKRVLEEIRRSSEEVERRNKEVLETLKRILEEVKERLKRI

SEQ ID NO: 20220 - protein, 58 aa, Artificial Sequence
  Synthetic
ELVRELRELVRRIEEELRKLTEEARKLLEDNRRRLEELDRELKELVDRIREELERARK

SEQ ID NO: 20221 - protein, 60 aa, Artificial Sequence
  Synthetic
DEAEKVLEDIKRSSEEVTRRNEKVARDSRKLSEDVEKKNRDVAERIKEIVDKVRRDLSRI

SEQ ID NO: 20222 - protein, 58 aa, Artificial Sequence
  Synthetic
ELVERARELVETNKKRLEDLDRELEELVKENEERLKRLDERLKELVDDIRRRAEEARK

SEQ ID NO: 20223 - protein, 60 aa, Artificial Sequence
  Synthetic
REAEELLKDLERSSEEVDRRVKESNKESEKVSRDVEKKVKDSNKELREITREVAERAKRT

SEQ ID NO: 20224 - protein, 59 aa, Artificial Sequence
  Synthetic
EKMIKRAAELLKTSEDRLRKLIKESEDSIRENEKKLRELIRESEETLREIRKRLEDLER

SEQ ID NO: 20225 - protein, 60 aa, Artificial Sequence
  Synthetic
KEAEDLMEELKKSSEDVERRVRESNKRSKEVSDRVAEEVKKLLERLKKILEEAARKRDRV

SEQ ID NO: 20226 - protein, 59 aa, Artificial Sequence
  Synthetic
EKVIRTIERLVRTSEKKLRKLLDDSRKSVEENRKRVTDLKKEARDLVEDIKRRLEEERR

SEQ ID NO: 20227 - protein, 61 aa, Artificial Sequence
  Synthetic
REEEKVLKDLDDVLKEVTERVREDLRTNEDVVRRAEEEVTRLHEELKRSNDRAKEEVDRKK

SEQ ID NO: 20228 - protein, 55 aa, Artificial Sequence
  Synthetic
EEVRKLVRELKEMLKRLEEDARRLVETTKKRLEDLKRTTDKLVKELEKTLEELRR

SEQ ID NO: 20229 - protein, 60 aa, Artificial Sequence
  Synthetic
SDRERVAKKLRDVLKEVDEEAKKDHDTNKTVVKKVREDIERILRRLKEVLRKVKEEAERK

SEQ ID NO: 20230 - protein, 55 aa, Artificial Sequence
  Synthetic
EELRKLVKELRDRLRELEESSRKLVEDTRRDLERLREEIDRLVEELERRLEELRR

SEQ ID NO: 20231 - protein, 61 aa, Artificial Sequence
  Synthetic
SDAETVLREIRKLNKEVNDASRETLERIEELNRRVERIVREVLKDIERLAREVEEVVRREG

SEQ ID NO: 20232 - protein, 59 aa, Artificial Sequence
  Synthetic
EELIRRLEEIVKESEDNSKENVDRNDRIVRESERSSKELEDELRRIVKKLAREVDELIR

SEQ ID NO: 20233 - protein, 61 aa, Artificial Sequence
  Synthetic
DDVERVLERIKELNRRVEEIVRRVLKTSRDLNKELNDISREVLKRIKDLMREVEEVVRRDG

SEQ ID NO: 20234 - protein, 59 aa, Artificial Sequence
  Synthetic
EELIRELERIVEESKRTSDKLAKELDKLNEDSERNSRKNIEDLRRLVEELARKAEELIK

SEQ ID NO: 20235 - protein, 60 aa, Artificial Sequence
  Synthetic
SLVEELEKLVEENERNMRELDKENRDIVEKNRENVERNERELRKLVERLERRIREVVRTK

SEQ ID NO: 20236 - protein, 60 aa, Artificial Sequence
  Synthetic
LEEIVREVKERIKRSNDEANKENKRTLDEIRDSNRDVNRVSKEVLDEIRRLLKELEDAAK

SEQ ID NO: 20237 - protein, 60 aa, Artificial Sequence
  Synthetic
SLIETLEELVDRNRRNLEKLDEENKDMLRKNEEDVEKNERDLRKLVKELRDEIRKLIEEK

SEQ ID NO: 20238 - protein, 60 aa, Artificial Sequence
  Synthetic
LEDIVREVIKRIEESNRRVNKRNRETLERSKKSNKDVNEASERVLRRIKELLDELRERAK

SEQ ID NO: 20239 - protein, 60 aa, Artificial Sequence
  Synthetic
SLEEELRRLVEELEKRLRELDKRNKDLLRENERNVEKLARDLEELVKKVRRVVEDVVTKK

SEQ ID NO: 20240 - protein, 60 aa, Artificial Sequence
  Synthetic
LEDIVREVLKRVKDLLERAEEENKKTLDDSRKSNEEVNREVEKVIRRIEELVKRLEEAAK

SEQ ID NO: 20241 - protein, 60 aa, Artificial Sequence
  Synthetic
DLVERLEELLKKIKRELEENIKRNRELLKKLEENLRRNEEKNRKLLEEIRKRLEDLLREK

SEQ ID NO: 20242 - protein, 62 aa, Artificial Sequence
  Synthetic
EEAEELVRRVEERMKEMVKRVHEVSEKNLRDIKKWLEDVNRISKETLDRLRELLKEAERRVR

SEQ ID NO: 20243 - protein, 60 aa, Artificial Sequence
  Synthetic
SLREELEELLKRIKERLKRLIEENRRLLEDLRRNLEENIRRNERTVEELKRDVKRLLDEK

SEQ ID NO: 20244 - protein, 60 aa, Artificial Sequence
  Synthetic
AEELVRRVKEEMERAVEEVKKTSEENLKAIKTWLEEVNRISEETLRRMREVLKELREDAK

SEQ ID NO: 20245 - protein, 60 aa, Artificial Sequence
  Synthetic
RLVEELEKLLKDSHDKDRKLIRENEELLKELKRNLDENIKTNEELVDRIRKRVEDLLREK

SEQ ID NO: 20246 - protein, 60 aa, Artificial Sequence
  Synthetic
AEDLVRRVEKEARDSSDESRRISEENLKEIKKWLDEVNEISKRTLEDAKRLLEDLERKAT

SEQ ID NO: 20247 - protein, 60 aa, Artificial Sequence
  Synthetic
DLEEELKTVLDRARKDVKRLKEELERILEEVKRMVEELDKRLEDLDEEVREKVKRLIDEK

SEQ ID NO: 20248 - protein, 59 aa, Artificial Sequence
  Synthetic
ERDVKRVLREAEELLKRVRDLVEKVLREIKRILEEVEELNRRIIRTSREILKRVEEEVK

SEQ ID NO: 20249 - protein, 60 aa, Artificial Sequence
  Synthetic
SLEERLDKVRRRVEEEIKRLEDRLEELDRRVAETVKRLDDEARKLDEELRERVKDIIRKK

SEQ ID NO: 20250 - protein, 59 aa, Artificial Sequence
  Synthetic
EEKVKRVIEEMEEIVKEVRKRVDEVIKTSEEILRRVRELNKEILKESEDLAEEVRKKAT

SEQ ID NO: 20251 - protein, 60 aa, Artificial Sequence
  Synthetic
KLEDELRKILEENRRIVKELEERMKRLDEAVRKAVEDLARSNEESNKRVKEVVDDLIRKK

SEQ ID NO: 20252 - protein, 59 aa, Artificial Sequence
  Synthetic
EEDVKKVLDDIKESSDRVRREIEEVLKESEERLRRVEKKNEDIDRRSEEILDDVRRKAK

SEQ ID NO: 20253 - protein, 60 aa, Artificial Sequence
  Synthetic
SLEEKARDVLRRSKELNDENRERAERMLDTNRRIADKLREEVERILREVEETVRRLIDEK

SEQ ID NO: 20254 - protein, 59 aa, Artificial Sequence
  Synthetic
EDVVERLLKEVEDSSRRVHKRSEELLRESREISERVRETVKKLLEDVERLLRKVTKEVK

SEQ ID NO: 20255 - protein, 60 aa, Artificial Sequence
  Synthetic
SLEDELREVLERSREKNERLRREAKKLLDTDRERVREILREAEKVLEEVKRTVEDLVREK

SEQ ID NO: 20256 - protein, 59 aa, Artificial Sequence
  Synthetic
EKVVEELLKRVEDSSKKVEDDVRRLLKEVEKISTELEELAKELVEEVRRIVKEVADRVK

SEQ ID NO: 20257 - protein, 60 aa, Artificial Sequence
  Synthetic
SLEERAEKILRDSKRTNEKNEEDVRRLLERNERRVRKIEEEAKKVLEDVRREVERLIREK

SEQ ID NO: 20258 - protein, 59 aa, Artificial Sequence
  Synthetic
EDVVRKLLDEVRESSERVHRKSEELLRRVEEISRTVEREVKKLLDRVRRVLEEAEKEVR

SEQ ID NO: 20259 - protein, 60 aa, Artificial Sequence
  Synthetic
DESRELVERVERVVRKVEKDHERLDRANKESTDRVREAVRRLDEENREVVRKVEDEVKKV

SEQ ID NO: 20260 - protein, 55 aa, Artificial Sequence
  Synthetic
KEAERLLDDVRRKLEELVRNAERSLEESRKTNEELEKRVRESLKEVERVLRELEK

SEQ ID NO: 20261 - protein, 60 aa, Artificial Sequence
  Synthetic
RETEEVIKTLEEVVKEVEERVRRLDEENKESTERVKKTVDDLDEENKRVVREVERRVKEV

SEQ ID NO: 20262 - protein, 55 aa, Artificial Sequence
  Synthetic
KRMEEVLKRVDERLKELERKVTDSLRRSREVNKRLRDKVEKSLREVEKVLEDLKR

SEQ ID NO: 20263 - protein, 60 aa, Artificial Sequence
  Synthetic
SLEERLREILKRNKEDVEDIRRRLEEILKRNKEEIDRLREELRRILEEVKREVKELIKRK

SEQ ID NO: 20264 - protein, 59 aa, Artificial Sequence
  Synthetic
EKTAEEVIERIKKLTEDVRRDVERVIREIEKSSDDLRKVVKDVIDDIKRLLKELREEIN

SEQ ID NO: 20265 - protein, 60 aa, Artificial Sequence
  Synthetic
SLEERLRKILTENERVIRKLERDLEENLERNKKTVKEIEDRLRKLDEDVERLVRELLRRK

SEQ ID NO: 20266 - protein, 59 aa, Artificial Sequence
  Synthetic
KDTAEEVIKEIEELTRRLEEEVRRVNERSDKSNEDVRRRVKEVEDESRDLARRLAERVN

SEQ ID NO: 20267 - protein, 60 aa, Artificial Sequence
  Synthetic
SLEERLRKILEKVKRTVDESRKRSKRLLEENRETMDRLREEAEEILERVKEKIKELVDRK

SEQ ID NO: 20268 - protein, 62 aa, Artificial Sequence
  Synthetic
EEAEKLVEEVIRDLDRVADELRELSKRLSDRSRESNERVRRTVKEVIKEIKRVLKELEEKVK

SEQ ID NO: 20269 - protein, 60 aa, Artificial Sequence
  Synthetic
DLRERMEKLLKEVKDEIDKSEKKSEDNLRTNKKDVDEIRKRLKRILDEVKEELRKLIDEK

SEQ ID NO: 20270 - protein, 60 aa, Artificial Sequence
  Synthetic
AEELVDRVAKRIRRVVEDVKRKSEDLNRKSNESNKRVRDLVERVKEEIDKVRDELRKSVK

SEQ ID NO: 20271 - protein, 60 aa, Artificial Sequence
  Synthetic
SEEERIRELLERVRRRLEESKKKSKDVADEVKETNDESRERSEKLLREVEERLRELLREL

SEQ ID NO: 20272 - protein, 56 aa, Artificial Sequence
  Synthetic
VEELRKEVEEVVERVRRISERLTEELRRSSERVKRISERLLEDLERVVRDVARRVK

SEQ ID NO: 20273 - protein, 60 aa, Artificial Sequence
  Synthetic
SEEERIRELLERVDRRLKESEKRSTDVARRVREENKELEKAARKILEDARRELEKLLREI

SEQ ID NO: 20274 - protein, 56 aa, Artificial Sequence
  Synthetic
VEELIKRVEDMVREVEKTSRKLIEELKRSSDEVRKMVEELLRRLERVLEEVKKRVK

SEQ ID NO: 20275 - protein, 58 aa, Artificial Sequence
  Synthetic
KDEETVTKLLEDVERKNRESEKDSRKIVEDVKDENRKLEDEARKSLEDSERKLERLER

SEQ ID NO: 20276 - protein, 56 aa, Artificial Sequence
  Synthetic
VRELAKRLRESTERVEEISRRLIKELEDSSDKVRKVVEDLLRENKEAVRRVAEEAT

SEQ ID NO: 20277 - protein, 60 aa, Artificial Sequence
  Synthetic
SELEKVEEDIRRLVERVKKIAEDVERLTRELVKEVRKSTEDSVRDIERLMKELREIARDV

SEQ ID NO: 20278 - protein, 59 aa, Artificial Sequence
  Synthetic
KDAKKRLEDLLDTLRKIVEDVSRRLKELNDRLRKLVEDSKRRNEELLRRLREIVKEIAK

SEQ ID NO: 20279 - protein, 60 aa, Artificial Sequence
  Synthetic
DSDKEVEKRIRELMKEVKDSTKESEDKIRESNERVKESSKRSEDEIRKLMEELDEIAKRV

SEQ ID NO: 20280 - protein, 59 aa, Artificial Sequence
  Synthetic
EDATRRLKKLLDDLKKEVDDSRRRNDELIKETERLIRESAKRNDKLLEDLKKRVDEIRK

SEQ ID NO: 20281 - protein, 60 aa, Artificial Sequence
  Synthetic
DEREEVEKRIRDLAEEVRRIVKRVEDETRRLVEEVKKSSDDSRRTIEKLARELKEITRRV

SEQ ID NO: 20282 - protein, 59 aa, Artificial Sequence
  Synthetic
KEAKDRLEDLLRRLREEVKRVKEKLKKLNDDLRREVEKSKEDNERLLKKLRDEVRKSAT

SEQ ID NO: 20283 - protein, 56 aa, Artificial Sequence
  Synthetic
DEVEKVLREIEKLIKEIREINKRINDRIEELIRRLRERVKKVSRESEELIRDLRRD

SEQ ID NO: 20284 - protein, 56 aa, Artificial Sequence
  Synthetic
ERKAREIIKRVEKVLEEVRRSLETSEKRVRDALREIEERLKENKRRVREVLEEIRK

SEQ ID NO: 20285 - protein, 61 aa, Artificial Sequence
  Synthetic
DEKEKLIKEVEDSTETVKRLVEELSRRSKKITEDVERLVKKLSDESKKILDEVRDLVRKRG

SEQ ID NO: 20286 - protein, 55 aa, Artificial Sequence
  Synthetic
EEADKLRKRSEDMVRRIEEHLKKNLKENKDALDKIRKELRENIETTKKTVDDIRK

SEQ ID NO: 20287 - protein, 61 aa, Artificial Sequence
  Synthetic
DEKDKLIEELDKILEDVRRRVEELSRRSKEITETVKELVKRLSDESERILREVDDVVRKRG

SEQ ID NO: 20288 - protein, 55 aa, Artificial Sequence
  Synthetic
EKAREVRRKVKETVERIEEELRRNIEENREMVERVEREARKNIKDTRKRVEEIRK

SEQ ID NO: 20289 - protein, 60 aa, Artificial Sequence
  Synthetic
RVEEKLEKIKRDIEKLVEDMKESNTRSKRKLEKLVEEMRRNNEELTRRVEELVKKIEDDV

SEQ ID NO: 20290 - protein, 59 aa, Artificial Sequence
  Synthetic
EDLVRRLLEEIRRILEEVRRTDKELLDENERILREVEKLNRDLVKEIEEILKKVEDDVR

SEQ ID NO: 20291 - protein, 58 aa, Artificial Sequence
  Synthetic
SEVEKAIEEIEKVIKEVRDKNRRVLEESKKLIRTVEETNKRNIEEIEKWIKTLDELTD

SEQ ID NO: 20292 - protein, 59 aa, Artificial Sequence
  Synthetic
EDAAKKAKEIIDKLRTLVEEVKRTNDKSLRDTREVVRRVEETLRRVEEKVKKRVDEIRK

SEQ ID NO: 20293 - protein, 58 aa, Artificial Sequence
  Synthetic
SEVEEVIRRIEEVLKELRRKNEEVLRESERANDEVRRVNEKNIRDIKKWLEDVKREVD

SEQ ID NO: 20294 - protein, 59 aa, Artificial Sequence
  Synthetic
EDARRRAEELERRVDKVVREVEKTNKESEEESKKLVDDVRRTLREITERVKDAVEKTLR

SEQ ID NO: 20295 - protein, 60 aa, Artificial Sequence
  Synthetic
SRDEEVARRVERVLEESEKLSKEVAEENEKVLREAREILEDVRKKVEDVARTLRELAKKV

SEQ ID NO: 20296 - protein, 59 aa, Artificial Sequence
  Synthetic
EEAKRRLEDLRRKLEELVKRNEKKLRDLDERLKELVERIERAAEKLLRDLRDLVRKITK

SEQ ID NO: 20297 - protein, 60 aa, Artificial Sequence
  Synthetic
RELEKVEKEVEDVLRDIERSSDEVRRENKRVAREMEESSRKVAEDVERVLRTLEELAKKV

SEQ ID NO: 20298 - protein, 59 aa, Artificial Sequence
  Synthetic
EEAKKRAEELVRRLEELLERNRETLERLDKELKDLVEKNKRTAEKLVKELEELVERIRK

SEQ ID NO: 20299 - protein, 60 aa, Artificial Sequence
  Synthetic
DELERVRREVKRLADESEKVSREVEERVRDTNRKSEEISRRVEKLARELLKKVEEVERRS

SEQ ID NO: 20300 - protein, 59 aa, Artificial Sequence
  Synthetic
EDLKRTLDELRKTIEKLVKDNRETLERLIRESEETIKRNREKLEELKRRLETLLRRVRK

SEQ ID NO: 20301 - protein, 60 aa, Artificial Sequence
  Synthetic
DELEDVRRRVDELVEELERVSRRVAELVKRIIDESRDISRRVARRVEELLRRLREVTKRS

SEQ ID NO: 20302 - protein, 59 aa, Artificial Sequence
  Synthetic
DELRKRLEDLKRKIERLLEDNRRKLEELIRRAEKVVEENERTMRKLKEDAKRLLEEIRK

SEQ ID NO: 20303 - protein, 59 aa, Artificial Sequence
  Synthetic
SVEDLVREVEERVRKVEKDLRELLDRLRRENEDAVRRSRESLRRNEEENKRVVDELRKD

SEQ ID NO: 20304 - protein, 55 aa, Artificial Sequence
  Synthetic
EEVVKKVREVLERVKETVKRVVDRNREVVKRLEDENRKVSEENKRVVEKVKEDAR

SEQ ID NO: 20305 - protein, 59 aa, Artificial Sequence
  Synthetic
SVEELVRRIAEKLRKVLDEIERLVDELRKENEEVVRDIERLVEDNEREVRDVLRKLEKD

SEQ ID NO: 20306 - protein, 55 aa, Artificial Sequence
  Synthetic
EDLVRDAERVLKRVTDEVRRVVKENKDVVRKVREEVERVSEENKRVLEKVTRDTK

SEQ ID NO: 20307 - protein, 60 aa, Artificial Sequence
  Synthetic
DEVETLKREVERLNKEVLDRVRKVIKEIKELDDRVRRENERVIREVERLIEEVRDRVRKN

SEQ ID NO: 20308 - protein, 59 aa, Artificial Sequence
  Synthetic
RRAEKIVKELREHSDEVVREMRELVERSKRHSTKVVEELKKSNKELEEKVRKVVRELEK

SEQ ID NO: 20309 - protein, 60 aa, Artificial Sequence
  Synthetic
SEVEELRERIKELNKRVLDTVRRVLERVKELNEEVDRRNKEVIKEVERLLEEVKREVTRE

SEQ ID NO: 20310 - protein, 59 aa, Artificial Sequence
  Synthetic
RRAEKIVDDIRRHSEDVVRRMRKLVEDSRRHSKRVVEEMERSNRELEERVKRVVEELKR

SEQ ID NO: 20311 - protein, 60 aa, Artificial Sequence
  Synthetic
SEVEELIKEIRRLNEEVRRRNKKVIEEVKKLNEDVKRKNDKVIEDVERLLREVKKRVEDE

SEQ ID NO: 20312 - protein, 59 aa, Artificial Sequence
  Synthetic
RRVEEIVRTIEKHSRDVVREMERSNDESEKHSRKVVREMEKSNKELKKKVEKIVRDLEK

SEQ ID NO: 20313 - protein, 60 aa, Artificial Sequence
  Synthetic
SEVEKLKREVERLNEEVLRRVRKVIEDSKRLNEEVRKRNEDVLKELKDLIREVKRRVEEE

SEQ ID NO: 20314 - protein, 59 aa, Artificial Sequence
  Synthetic
DRMRKIVEDLRRHSEEVVREAEDLVRRSEEDSRRVAREMEKSNEEIEKEARDVVRELER

SEQ ID NO: 20315 - protein, 60 aa, Artificial Sequence
  Synthetic
SEVERVVKEAEDLSRENNKRVKEVVRRAEDTNRRVEDENRKLLKEIKDLLREVKETVKRI

SEQ ID NO: 20316 - protein, 59 aa, Artificial Sequence
  Synthetic
ERVRRLLEEVLRRVAEDVRRSEEELDKVLRDSAESLKRSDKSLRDIVREVEKVLDEIRK

SEQ ID NO: 20317 - protein, 57 aa, Artificial Sequence
  Synthetic
SAEDLLRKLREDVERVMRELRKSNEESRKRVEEVVEEAERILKESRERSEELVRRLN

SEQ ID NO: 20318 - protein, 59 aa, Artificial Sequence
  Synthetic
EEVLRKLAEDVKRVLDKVKEENKRLLEENDRMLEEVRRLLKKLLEESEKVLEEVERKAR

SEQ ID NO: 20319 - protein, 59 aa, Artificial Sequence
  Synthetic
DLREEIRKLREDAKRVIDESRKSVKENEKRNKKLLDESEKSVRENEERNKELIKRVKDR

SEQ ID NO: 20320 - protein, 59 aa, Artificial Sequence
  Synthetic
REVLRKVKEELRRVLEKLRRLNEEASRENERILRELRKKNRDMNEDNRRILEELDEKAR

SEQ ID NO: 20321 - protein, 59 aa, Artificial Sequence
  Synthetic
DMEREVEKLERELRELIKRIRKIVDENRRRNEELLERSRESVRRNEEENRKLLEEVKKS

SEQ ID NO: 20322 - protein, 59 aa, Artificial Sequence
  Synthetic
EKVLREVKEEVRKLLEEIEKTVRDVSRENKRILDELRKKNKRADEENREILKKLREDVR

SEQ ID NO: 20323 - protein, 59 aa, Artificial Sequence
  Synthetic
SMEEEIRRLEEDVRRLVDKSRKSVKENEERNRKLLEESKESVRDNARRNEKLIRDVRRK

SEQ ID NO: 20324 - protein, 59 aa, Artificial Sequence
  Synthetic
REMLEEVLRRLEDALRRLEEENKRVSEDNERILEELRRKNEEADKRNRDILDDLRRRAD

SEQ ID NO: 20325 - protein, 59 aa, Artificial Sequence
  Synthetic
DMEDKVRKLERDVRELIKEVEKIVRDNADENRRVVEESEKSVRELADRARRLIDEIRKG

SEQ ID NO: 20326 - protein, 59 aa, Artificial Sequence
  Synthetic
EDVLREVKERVEEVLDRVRKKVEKVSRENKEIVKEVRKKNEDAVREAEELLKKIREEVR

SEQ ID NO: 20327 - protein, 60 aa, Artificial Sequence
  Synthetic
DEVEEVVRRIEELIKEVEDVDRDIERRVKELDEELRRVDDEIRRRAKKLLDDLEKRVREI

SEQ ID NO: 20328 - protein, 59 aa, Artificial Sequence
  Synthetic
ERVRRILTELRKRVEKVVRDSEKTLRESVERSARLLKESKESLEELERRAREVVERIKK

SEQ ID NO: 20329 - protein, 60 aa, Artificial Sequence
  Synthetic
DELEEAEKKVRDLIRRLREMNERALRESERLIRRLREVDEEIVRRIEDLLKKLREEVERE

SEQ ID NO: 20330 - protein, 59 aa, Artificial Sequence
  Synthetic
REVRKTLKDLEDTVKRVLEESEESARESEKRSRDVLRESERSLRELEKKVRKLLEEVKK

SEQ ID NO: 20331 - protein, 61 aa, Artificial Sequence
  Synthetic
SDVDKVAKEIDDALKDVRRKVDKVRKDNERVNREVEERVRRVTERNRDVIEEVKRRVEEVK

SEQ ID NO: 20332 - protein, 56 aa, Artificial Sequence
  Synthetic
SELVREIERRLEELVKELRKILDELRKRNEDTRRRLEEALKRNREEAERLEREIRK

SEQ ID NO: 20333 - protein, 60 aa, Artificial Sequence
  Synthetic
KDVDEIATELDEVIDRIRKKVKEVVERDEKVNRDVNDEVDKLTERNRRVLDKVLKDVTRR

SEQ ID NO: 20334 - protein, 56 aa, Artificial Sequence
  Synthetic
DRLVDELRKRVEDAKREIREILEKLKRDNDESKKRLERLLKENEDALREILERLRK

SEQ ID NO: 20335 - protein, 61 aa, Artificial Sequence
  Synthetic
DDVEKAVREVEEMLKRVDKEVERVSRENKRVSDEVRKKVKEVERKIKEVLDRIKDEVDRVK

SEQ ID NO: 20336 - protein, 56 aa, Artificial Sequence
  Synthetic
DELVKRLEDKMRRVKEKLKRLLEKNREDSERSERELREILKKITREVEELAKELEK

SEQ ID NO: 20337 - protein, 56 aa, Artificial Sequence
  Synthetic
EEVKKLLEEVRDLLRRVLEEVERSSDEDRKLNERVNEAIEKSIREVEELLRRIDRE

SEQ ID NO: 20338 - protein, 56 aa, Artificial Sequence
  Synthetic
EELVEELKRRVDEVKRRAEEINRENDERNKESKRRLEELNERLEERVRRLEEKLKK

SEQ ID NO: 20339 - protein, 57 aa, Artificial Sequence
  Synthetic
DEVEDLRRRVEKILEDVKRTVETASKRDRELNEEVNRLLRESVERVDRLLDRIRREA

SEQ ID NO: 20340 - protein, 56 aa, Artificial Sequence
  Synthetic
KEIVDRLRKAVEEVSREARKILDENRRRNEESEKRMREINKRLEDKVREVKKELEK

SEQ ID NO: 20341 - protein, 57 aa, Artificial Sequence
  Synthetic
REVDKLREDVRRLLEELLRALRESSKEDEKLNRKVNREVDRVLKEVDDLLEDIKKRV

SEQ ID NO: 20342 - protein, 56 aa, Artificial Sequence
  Synthetic
EEIVKRLEEEVREIVKEIKEINDKNRKKNEDSARKADEKVKELEERVRRVVKELRD

SEQ ID NO: 20343 - protein, 56 aa, Artificial Sequence
  Synthetic
KEVEDLVRRVEKLLRDIDRELKRSSDEDRELNERVNREVDRVLREVDRLLKEIRET

SEQ ID NO: 20344 - protein, 56 aa, Artificial Sequence
  Synthetic
ERIVRTLEKRIRDLVRKAEEIDRENEKRNKESSDRMERLVRELRKRVKRLVEELER

SEQ ID NO: 20345 - protein, 56 aa, Artificial Sequence
  Synthetic
DEMRRLLREVERILEEVERVLEKSVRDDERVNREVNRRLDEVLRRVEDLLRRIEKE

SEQ ID NO: 20346 - protein, 56 aa, Artificial Sequence
  Synthetic
ERLLERVRREVEKVRERADRIDKRLEDTNRRSKDRAEELVRELEKRVEDLKEKAEK

SEQ ID NO: 20347 - protein, 56 aa, Artificial Sequence
  Synthetic
DEVRKLEEEVDRILREVKEMVEDSIRRHKEVNDEIRRRVERVLEEVKTLLDLIREK

SEQ ID NO: 20348 - protein, 56 aa, Artificial Sequence
  Synthetic
KEIVDELRKRVEDVSREAKKLDDDLRENVKRLSEEMKKLVDDLRREVDRLEKERRK

SEQ ID NO: 20349 - protein, 57 aa, Artificial Sequence
  Synthetic
DEVEELRRKVEEILRRIREDVRKSIEDHRDVNRRVLEAVRRSTKRNKDVVDRLRDED

SEQ ID NO: 20350 - protein, 56 aa, Artificial Sequence
  Synthetic
ERIVKRLEDEVRKLVDEMRKLDEELTRNVDEVRREAERLDKENRDENRKLKEELKK

SEQ ID NO: 20351 - protein, 60 aa, Artificial Sequence
  Synthetic
SEMEKVVTDAKELLERLDRELERVIRESDKILDELRRKIEEVIKRSDELLEELDRRIKEN

SEQ ID NO: 20352 - protein, 56 aa, Artificial Sequence
  Synthetic
EELIERVRRLVEELIEKAKKLLEESERKSARLIEDLERLLEESRRKSDKLIKKARK

SEQ ID NO: 20353 - protein, 60 aa, Artificial Sequence
  Synthetic
DEVEEIRKEIEDILRRLRDLLRRVIEDSRRLLDELRERNERVIKESEDLLRDLEDKIRKR

SEQ ID NO: 20354 - protein, 56 aa, Artificial Sequence
  Synthetic
KEIVDRLRDEVRKLEEEAKELLRESNELTRELIDRLEKLNRDSNRKSRELIERLRK

SEQ ID NO: 20355 - protein, 60 aa, Artificial Sequence
  Synthetic
SELEEVEERIKKELDRLEKKMEESIKRDKEINRELNEMLKKSIKDSDDILRELRKEIEDD

SEQ ID NO: 20356 - protein, 59 aa, Artificial Sequence
  Synthetic
KRAEEIVKKLEKEVEDLVRKAKKLVDELRKENEESKKRARELLRRSEEKVKKLVREAEK

SEQ ID NO: 20357 - protein, 56 aa, Artificial Sequence
  Synthetic
DSEELVRTVKKELEDIIRESRKLVEDVARALEKIEKEIEEIVRTTDKELRKLIEEA

SEQ ID NO: 20358 - protein, 55 aa, Artificial Sequence
  Synthetic
EEVVKKVKDLLRELEKHNRTVLEEVKKALDELRRRLEEVHRRSKETLDRIRRDAT

SEQ ID NO: 20359 - protein, 56 aa, Artificial Sequence
  Synthetic
REDELVDTVRKRLKELIEESERLLEEVKKKLEEIKRRVEKILRETEKELRDIIRKN

SEQ ID NO: 20360 - protein, 55 aa, Artificial Sequence
  Synthetic
DKVLEKVRKVLEDLKRENKEVVERVDRVLEDAKRKLEKVHKDSRDALKKLDEDAK

SEQ ID NO: 20361 - protein, 56 aa, Artificial Sequence
  Synthetic
SEKELLDRVKEKLKKIIDDVEEILRRSKKELEKIIRESEKLVEEVKRDLRRLIEEN

SEQ ID NO: 20362 - protein, 55 aa, Artificial Sequence
  Synthetic
EKVVEEVERVLEKLLRDVERVHRRTKEVLDELRKENKKVVEDVRDVLEKARERAR

SEQ ID NO: 20363 - protein, 60 aa, Artificial Sequence
  Synthetic
EEVEDVARKIEKLLEDVRRIDKEISDRNRELLKEVRKIDEKILREIEKLLEELRDTATKD

SEQ ID NO: 20364 - protein, 55 aa, Artificial Sequence
  Synthetic
EEAERIKRELDRIRKESEETVKENEERLRRIKEESRRSVERARTELKRIEDEVRK

SEQ ID NO: 20365 - protein, 60 aa, Artificial Sequence
  Synthetic
KVEDELRKLREEVRRSKEEVEKKVKELDEEVKRSKRESEKKLRDLREEVKRLEDDAERSN

SEQ ID NO: 20366 - protein, 59 aa, Artificial Sequence
  Synthetic
EKFLEEVRERVRKLLDENHKILKEAERRVEELLRRNHKILKEALDRVRKLLKELRDRTR

SEQ ID NO: 20367 - protein, 60 aa, Artificial Sequence
  Synthetic
SIEEILRELREHVKENMERSEEIVRDLTRKVDESTRDSERILEKLKKDVDKLEEDAKRAN

SEQ ID NO: 20368 - protein, 62 aa, Artificial Sequence
  Synthetic
EEAEELLREVRERVERVSRRNEELLKRVERDVERVLRENHELLKRVAEEVERVLKEVRERTK

SEQ ID NO: 20369 - protein, 60 aa, Artificial Sequence
  Synthetic
SIEEILEKLRREVEESEKDSRRSAEELRKHVRENEKRSEDIVRKLTEDVERLERKARSRN

SEQ ID NO: 20370 - protein, 62 aa, Artificial Sequence
  Synthetic
EEAKELVREVAERVEDVLRKNHEINKTNAEAVKKWSEDNRKLLEDVRREVERVLKELEKEMT

SEQ ID NO: 20371 - protein, 59 aa, Artificial Sequence
  Synthetic
DEVRKLVEELRKINEDDKRRSDKNFDDNRKLAEDVKRVLERNVEENRKMAKRLEEVLRN

SEQ ID NO: 20372 - protein, 55 aa, Artificial Sequence
  Synthetic
EKLLKEAEERIRRNAEENRKLLERSKKALEEVERRARKLLEESRRALEELKKRAD

SEQ ID NO: 20373 - protein, 59 aa, Artificial Sequence
  Synthetic
DEVRELVKELRELNKRDKKRSKELRDKLEEANREDEEKTRKNKEDNERMAREVERVLRD

SEQ ID NO: 20374 - protein, 55 aa, Artificial Sequence
  Synthetic
ERLLKEAEELIRRNEEENRRILREVEERIKKNEDDNRRVLKRSREELERVEREAR

SEQ ID NO: 20375 - protein, 59 aa, Artificial Sequence
  Synthetic
DEVDKLRKELEDANARDREKSKENKDENDKALKELEEVLEKLKRELEEIVRRVKEVLDK

SEQ ID NO: 20376 - protein, 55 aa, Artificial Sequence
  Synthetic
EEILKKIEKEIRTNREENERLLKESEDELKRLEDEMREILERIKRLIEEVEERAR

SEQ ID NO: 20377 - protein, 59 aa, Artificial Sequence
  Synthetic
DEVRELVKELERINKEDRDKSRENFKRNADIAKEVEDNLERNEEENRKVEEEVRKVLRD

SEQ ID NO: 20378 - protein, 55 aa, Artificial Sequence
  Synthetic
EDLLRDAKRKIDENKEENERLLKESRKLLERVRKRAEELLRKSRKALEDLKEEAK

SEQ ID NO: 20379 - protein, 59 aa, Artificial Sequence
  Synthetic
SEVDKLEKEVRDANERDRRNSERNRKENEEMLRRVERVLRELKKKLEEAIRRARKVLDD

SEQ ID NO: 20380 - protein, 55 aa, Artificial Sequence
  Synthetic
ERILERIEELIRDNAKRNEDLLRRSKEMLDELRKKAKEILDRIRKLIKEVEDKAR

SEQ ID NO: 20381 - protein, 60 aa, Artificial Sequence
  Synthetic
DEVERVVEKLKTLIEEWKRLTEEIEKKNEELIRRIEKVLEDLFRENEKLARDIKREIDEL

SEQ ID NO: 20382 - protein, 55 aa, Artificial Sequence
  Synthetic
EELLRRIEEDIERLERTDREVLKRSEKKIRELRERAKELLKRSEEIIKKLEDEAR

SEQ ID NO: 20383 - protein, 60 aa, Artificial Sequence
  Synthetic
SKDDELKRKIDELIDRWRRLTEEIKKKNDELVKKWEKLTKEVTDHSRDLNRKIREELERL

SEQ ID NO: 20384 - protein, 55 aa, Artificial Sequence
  Synthetic
ERLLEEIEERIEKLERDDKKVLDDSRKKIDDLRKRDEEVIRRNRESIDRLRREAD

SEQ ID NO: 20385 - protein, 60 aa, Artificial Sequence
  Synthetic
DEVETVDDRVKKVIRKLEELLRELAKLNKDIVDDIRRRLKEVEERNRKLAEDIERLLEEG

SEQ ID NO: 20386 - protein, 55 aa, Artificial Sequence
  Synthetic
EDVIKKVRDEAERIRREVRRLDEESRKTVKRLLDEVRELNRRSEEELRELRRRIE

SEQ ID NO: 20387 - protein, 57 aa, Artificial Sequence
  Synthetic
SELEEVRERLRKLIEDLKRLNEESLKENREIIKALRELNERSLRENKELIKRLEDSN

SEQ ID NO: 20388 - protein, 58 aa, Artificial Sequence
  Synthetic
DEARTIIEEIKRRVDELRKHIEESIKEVKKLNDEVEKHIRESIKESEEDLKRLKDRID

SEQ ID NO: 20389 - protein, 60 aa, Artificial Sequence
  Synthetic
KDDEDVDEKIRRAIKKNEELSREIEDKIRRILKKHEDLTRDLAREIREVVRKLRELSKRG

SEQ ID NO: 20390 - protein, 55 aa, Artificial Sequence
  Synthetic
EELLRKVEELLRRLEEENRKILKEVDERLKDLEKKDRDLLEEAKKLLEDVERELR

SEQ ID NO: 20391 - protein, 60 aa, Artificial Sequence
  Synthetic
SELEKLIKELRDLVRESEERLRELVRKVKELIKRSEDEVERLLDRSRELAKELEEEIRRK

SEQ ID NO: 20392 - protein, 59 aa, Artificial Sequence
  Synthetic
REVLDKLKKDAKRVNDDSERIIKRADEEVKRVNEESKRMLEENEKMNRDLVRRIRERIK

SEQ ID NO: 20393 - protein, 56 aa, Artificial Sequence
  Synthetic
DLEEMLTEVERLARELEEESKKIRKEVERLARELEEESKEINKRIKDKADDLKEKL

SEQ ID NO: 20394 - protein, 59 aa, Artificial Sequence
  Synthetic
REIIKRLVDEVKKVIDELMKKNRKLLEDVERILTELSERNRDLARKVDKLIRDLEKRAR

SEQ ID NO: 20395 - protein, 60 aa, Artificial Sequence
  Synthetic
SKLEEVKERVKKLSKRNLDVAKRVLDEIDKLIKEDLKKTEDALRRIKELLDRLREMKRRG

SEQ ID NO: 20396 - protein, 59 aa, Artificial Sequence
  Synthetic
ERIRRIVKEVRELVRRNDEEVDKIVEEVKRLLERSSRENEKVVREVEELLKRLEEEARK

SEQ ID NO: 20397 - protein, 60 aa, Artificial Sequence
  Synthetic
DDVERLLKRVKELIDDDLRKTEKALREIEKLSRDNKKRTEDVLREIEERLRRLEEATRRG

SEQ ID NO: 20398 - protein, 59 aa, Artificial Sequence
  Synthetic
ERVRKIIRDVERLLEESTRRNEEAVKRVERLLEENKKRNEDVVREVEKELRRLREEARK

SEQ ID NO: 20399 - protein, 60 aa, Artificial Sequence
  Synthetic
SDIEKVLEDIRRLSKKNVDDSKRVLDEIRELSKRNLELVKEVLERIRRLLKKLEEARRRG

SEQ ID NO: 20400 - protein, 59 aa, Artificial Sequence
  Synthetic
ERIRKIVEDVKELLDRNREENERIVREVEKLLDENRKEVEKILREVERLLEELEKRERD

SEQ ID NO: 20401 - protein, 60 aa, Artificial Sequence
  Synthetic
KEVEDLLKRIRDLLKRVEETSREVLEEIKRLIDRDRKHSKEVLDEIKELLKRLIEAAKRG

SEQ ID NO: 20402 - protein, 59 aa, Artificial Sequence
  Synthetic
ERVRTIIREVEKLLKELEDKNDEIVRRVEELLRKSHEDNRRIAEEVREMLKRLEDEMRR

SEQ ID NO: 20403 - protein, 61 aa, Artificial Sequence
  Synthetic
SSLEKVEKDIRKLNDDSKKEAKRVTEENRKSNEDVERELRKIVEEVRRLIKDVEDKIRKDG

SEQ ID NO: 20404 - protein, 59 aa, Artificial Sequence
  Synthetic
ERVKRIVDELRKSLRKLEEDVKELIKENKESNDRLRERVERILKELRELLRELEEKVKT

SEQ ID NO: 20405 - protein, 61 aa, Artificial Sequence
  Synthetic
SEVERLVEEVRKSNKKWEEESRELTERNKKLNRETTKRAEDLLERVRELVRTVTEIIKREG

SEQ ID NO: 20406 - protein, 59 aa, Artificial Sequence
  Synthetic
ERLKRIVEEIRDSVRRLKEKSEELVRRNEESNDRLRRRVEEIAKEARDLVRRLEEEVRR

SEQ ID NO: 20407 - protein, 61 aa, Artificial Sequence
  Synthetic
SEAERVLEEVRRLNDKSKKTAEKLTEENKRLNKRTTDFLKEVLERIEELVRRVEDRIRKEG

SEQ ID NO: 20408 - protein, 59 aa, Artificial Sequence
  Synthetic
KRVKDIVREIRDSVRKLEEEVRKLIRENEKSNKDLRRRVRKIEEDIKRIIRELEERVRK

SEQ ID NO: 20409 - protein, 61 aa, Artificial Sequence
  Synthetic
SELEKILKDIEDLVRKWLEESKDLLRKLKKLNEDTTERLRRLLDELRKLIKDLLDKIRKDG

SEQ ID NO: 20410 - protein, 59 aa, Artificial Sequence
  Synthetic
KRVKDIVKKIEELVKKAKEESKKIVEEVRRSVKRLEEEVRKIEKDIKDLIDELRKKVTT

SEQ ID NO: 20411 - protein, 59 aa, Artificial Sequence
  Synthetic
SEVEDLRRELEEINKEWNKRTKDLVKEVEEVNRDINKKIRDLLREARRLVDEIRRLIEK

SEQ ID NO: 20412 - protein, 56 aa, Artificial Sequence
  Synthetic
EEVIKELRKLLEESERRAREMNKRLDRLLEESKKDVDRVREEIKRLVDEIEDRARK

SEQ ID NO: 20413 - protein, 59 aa, Artificial Sequence
  Synthetic
DEIEEVLKRLEEIVKTWDERTKRLTERVRTVNREVNERHKKLTRDLRELAREVLDLVRQ

SEQ ID NO: 20414 - protein, 56 aa, Artificial Sequence
  Synthetic
REMLRELEERIRTVEDKVRRVNEELRELLKTSNRRSEEIEKELEKILREIRERARK

SEQ ID NO: 20415 - protein, 59 aa, Artificial Sequence
  Synthetic
DEVRKVLEDLRKIVREWEERTERLLRDLKRINEEINRRVEKLTEELRRLVKEIKKLTDD

SEQ ID NO: 20416 - protein, 56 aa, Artificial Sequence
  Synthetic
EDVLREADKIIEDVEREARRVNKELKDLLDESAERIERIIREIERLVEKIKRDADR

SEQ ID NO: 20417 - protein, 59 aa, Artificial Sequence
  Synthetic
SEIEKVLDELREINRRINETAKEILRRLKEINERTKKEIDRLLDELRKLLRRVEELRKE

SEQ ID NO: 20418 - protein, 56 aa, Artificial Sequence
  Synthetic
EEALKDLERLLRESEKRIREIIKRIRESVEKLERDVRRVIDEIRRRLEEIERRLRK

SEQ ID NO: 20419 - protein, 55 aa, Artificial Sequence
  Synthetic
KEVEEALEELRRILREWEEVTKRLEERVEEINRRSLEELRRLKEEVEEIAKRIRD

SEQ ID NO: 20420 - protein, 56 aa, Artificial Sequence
  Synthetic
KEVLEELDKLVKDIKRKVDEVNEKWKESSKRLEDEHRKVIKELEELVKRVEEELRR

SEQ ID NO: 20421 - protein, 55 aa, Artificial Sequence
  Synthetic
KEVEDALKKAEDILRRWEEVTKKLKDEARKINEDSRRKLKRLKEESREIVERIKK

SEQ ID NO: 20422 - protein, 56 aa, Artificial Sequence
  Synthetic
EEVLRRLEKLVEDIKRKVAKVNDEWRKSSEDLEREHRKVHRESEKLIRDVEDRLRK

SEQ ID NO: 20423 - protein, 55 aa, Artificial Sequence
  Synthetic
SEVEEVRREVKRVVDDWRRVTKKLLDDIRRISEESKKIIRDLKEAAKTMIREVER

SEQ ID NO: 20424 - protein, 56 aa, Artificial Sequence
  Synthetic
EEVLKELEKLLEDLRREVEEVNERLKRLLDENEKRIREVLRELKKLLRDLDEKLRR

SEQ ID NO: 20425 - protein, 60 aa, Artificial Sequence
  Synthetic
DELERVREEVKKLSDTSREKLERALKKARDLLEENERRLRELKKEVEELIRRIEEKLKDR

SEQ ID NO: 20426 - protein, 59 aa, Artificial Sequence
  Synthetic
EELRKVLTDIERLLRENKKELDEVLKEVEKLSREADDKNRKVLKEIKELLDELKKRAKD

SEQ ID NO: 20427 - protein, 60 aa, Artificial Sequence
  Synthetic
SEVERMLEEVERISEESKRKLEEVLRRVEEIIKAIERTLEKVLKDDEEIIRRIEDTLRRR

SEQ ID NO: 20428 - protein, 56 aa, Artificial Sequence
  Synthetic
REVVKTIDDLLRENERRVDEALEEIEKRARDLREKVKELEERLDRTNRKLKKKVED

SEQ ID NO: 20429 - protein, 57 aa, Artificial Sequence
  Synthetic
KEVEDIIEESRKLDKELEDEIRRIIEESRRLNEELEEIARRIDEEIKELLERLKRRD

SEQ ID NO: 20430 - protein, 59 aa, Artificial Sequence
  Synthetic
KEDVERLVRSNREVARDVREKLKRLLEHNKEVVDRVREELKRLLDEARRVIEEVRKKAD

SEQ ID NO: 20431 - protein, 60 aa, Artificial Sequence
  Synthetic
DELERIDEKIKRDVEEHKRETKRILDESERLNREVKKRLEEIRERIRRLAEEIRKEIERD

SEQ ID NO: 20432 - protein, 59 aa, Artificial Sequence
  Synthetic
ERKLEKVMEDVKRLIDEARKENEDVARRMERSNKELKRKLDEIRREVEELIKELRERTK

SEQ ID NO: 20433 - protein, 60 aa, Artificial Sequence
  Synthetic
DDLERAREEVADLIRKHEEKTRRILEESRRLNERHRELSKRILDEIRKLAERIEELIKRE

SEQ ID NO: 20434 - protein, 59 aa, Artificial Sequence
  Synthetic
KEELDRIEEELKRLIDTLREKNREVEKRARDSNRDLKRTNDEIAKEVRELIKKLREDLK

SEQ ID NO: 20435 - protein, 60 aa, Artificial Sequence
  Synthetic
RELETIADRIRKLSRENSEVLKEIARRIERLVEEHRKESERILKEIKELADDITRLIRED

SEQ ID NO: 20436 - protein, 59 aa, Artificial Sequence
  Synthetic
KEELDKVEEEVRRLIRTNREILRTIEKRVRDLIEELKRRNDEIARRVEELIKRLRRETD

SEQ ID NO: 20437 - protein, 60 aa, Artificial Sequence
  Synthetic
SELEKVADELRKLIKDDNDLLDEILDRIRKLSKENEKRLREILKEIRKLMDEISKLIKKD

SEQ ID NO: 20438 - protein, 59 aa, Artificial Sequence
  Synthetic
KEELDKIREELERLIKRNKEKLDEIRREVDELIKKNEETLKRIEEEVRKLIEDLKEELR

SEQ ID NO: 20439 - protein, 60 aa, Artificial Sequence
  Synthetic
SDLEKIEKEIEDLVKRDNEVDKKVMREIRELSKENKERLRKILEDLRREAKKIKDDIERE

SEQ ID NO: 20440 - protein, 59 aa, Artificial Sequence
  Synthetic
KEKLKRVEKKVRELIKRNRDHNERTREDVEKLIRDNEDTLRRIEEEIERLIEKLKRDTK

SEQ ID NO: 20441 - protein, 57 aa, Artificial Sequence
  Synthetic
KEVEDAVKELEDLLRKNEDKTRKIVEDMRRSNKDLEDHSRKSEEEVRKLLDDLRRAG

SEQ ID NO: 20442 - protein, 56 aa, Artificial Sequence
  Synthetic
IKTLLDRVRKLAEEDNERLDRLRRESEELNERVRRVDKKLLEEIRRKAKKVEDDTR

SEQ ID NO: 20443 - protein, 57 aa, Artificial Sequence
  Synthetic
DEVREVDRRLKELLRRLKETIDEIRRRMEESNRRLEDHSRKSEEEARKLLEELERKG

SEQ ID NO: 20444 - protein, 56 aa, Artificial Sequence
  Synthetic
LEELLRRLEELAERAERKLEKALRDSEDLNRKVTEVDRRLLKEIRDLVEKVERERR

SEQ ID NO: 20445 - protein, 57 aa, Artificial Sequence
  Synthetic
SEDEKVRKEAEDLLRELEKHSRDTERRARKSNRDNNEHSKESVKDLRRLLERLRKAG

SEQ ID NO: 20446 - protein, 56 aa, Artificial Sequence
  Synthetic
IRKLLEEVRKLVDDLRKRDEEIMKTSERLNEEDNRKDRRLVEDVKRLADEVEKKTR

SEQ ID NO: 20447 - protein, 57 aa, Artificial Sequence
  Synthetic
SKVDDVKRRIRKLLEDSKKRSRESIERVERSNRRLEKHSRDSARRAKELLDKLREEG

SEQ ID NO: 20448 - protein, 56 aa, Artificial Sequence
  Synthetic
IDELLERLKELAKRIKELDDRLLRELEEINKTTEKLDRDLLKEIKERIDELRKREK

SEQ ID NO: 20449 - protein, 57 aa, Artificial Sequence
  Synthetic
DKVERVKKEVRDLLRRLEKHSEDSVREIDTSNKRLEEHSRRSKEELKRLLRKLKEAG

SEQ ID NO: 20450 - protein, 56 aa, Artificial Sequence
  Synthetic
IDRVLEEVRKIIRRIEEEDRRLLKEIRDINETTERLDRKLLDELRKVVKDIEDRER

SEQ ID NO: 20451 - protein, 60 aa, Artificial Sequence
  Synthetic
SELEEVKKKVEKLIRDVEKVSEDTRREVERLIREVEEATKEHLDRVRRLIEELREVRKAG

SEQ ID NO: 20452 - protein, 62 aa, Artificial Sequence
  Synthetic
DRLRERLERLAKEIEDLLRRLREISRTIEERARRLLEELKKRSEDLRKTAEELLKEIDEELK

SEQ ID NO: 20453 - protein, 57 aa, Artificial Sequence
  Synthetic
DEVETIKKKAEDLLRDSKRKTDELTKRMEELLERSKEDSERLIRRLRELLERLRRRG

SEQ ID NO: 20454 - protein, 56 aa, Artificial Sequence
  Synthetic
EEDVDREVKRLVDESKKIIERVEEDVKRLIRESEKKSRDVERRVEELERKAREDER

SEQ ID NO: 20455 - protein, 56 aa, Artificial Sequence
  Synthetic
SEVEKIKREMEKLLEEHKKLVDDIRREAERLHEEHRRLSDKIREDLKRLLEELRRS

SEQ ID NO: 20456 - protein, 59 aa, Artificial Sequence
  Synthetic
RKELDRLRREVEKVVRELKERNKELLKRLEEAVEELKRRNRKLLEDARRVVEEIKERAR

SEQ ID NO: 20457 - protein, 56 aa, Artificial Sequence
  Synthetic
STVERIDEELKRLHTEHKKLSDDIKREAERLHEEHRRLSEEIRERLERLLEELRRR

SEQ ID NO: 20458 - protein, 59 aa, Artificial Sequence
  Synthetic
EEDLDKILRDLERTAKELKDRNRRLLEEVERVVRELKRRNKELLKTVERVAREIERRAE

SEQ ID NO: 20459 - protein, 56 aa, Artificial Sequence
  Synthetic
REVEEIDKELRRLHEEHRRLVEDIRRKLKKLHDEHRRLSEEIKRRLEELIRKLRED

SEQ ID NO: 20460 - protein, 59 aa, Artificial Sequence
  Synthetic
REELTKLLEEVKRVVDRLKEENKRLLKEVKEVAERLKRENERLLEELRRVAEEVRERTR

SEQ ID NO: 20461 - protein, 56 aa, Artificial Sequence
  Synthetic
KEVEEIREEAKRLHEEHRRLSKRIDDELKRLHDEHKRLSDEIRKELERLIEELKKG

SEQ ID NO: 20462 - protein, 59 aa, Artificial Sequence
  Synthetic
RDKARKLLEEVRRMVKRLKEENKRLLEEVRKVVEDLKRRNKELLEKLKREAERVKEEAK

SEQ ID NO: 20463 - protein, 56 aa, Artificial Sequence
  Synthetic
SEVDEIRKRLEDLHREHRELSREIEERLKKLHDEHRRLVEEIIRRARELLEDLRRE

SEQ ID NO: 20464 - protein, 59 aa, Artificial Sequence
  Synthetic
RDKVERLLREVKKVVDKLKKDNEKLLRDLKRVVDELKEKNKRLLEEVKRVVDDIRRRAK

SEQ ID NO: 20465 - protein, 60 aa, Artificial Sequence
  Synthetic
DEVREVERKIDKLAKDLKDELRRLLKEYEELVERLEELLERILRESEKLAEELKEELKRR

SEQ ID NO: 20466 - protein, 55 aa, Artificial Sequence
  Synthetic
DKVRKRIEELVKELKDILEEIKRRVEELDERSKRILKEIADRNRKLVDELRKTLE

SEQ ID NO: 20467 - protein, 60 aa, Artificial Sequence
  Synthetic
SEVEKALEDVRRLVEELKKELKEILERYKRLVDKLKKENREDHERSKELAERLKDLLRKS

SEQ ID NO: 20468 - protein, 55 aa, Artificial Sequence
  Synthetic
EKVRDTLRKLLEELDDLVRRIKTTLRKLVEESRRSLRKNEEDNRKLVEELREEAR

SEQ ID NO: 20469 - protein, 60 aa, Artificial Sequence
  Synthetic
DEVREVLREAREVVKRLKDRLRRILEESRRVVDELRDKNRKDHETYRKVVEELKKRLEER

SEQ ID NO: 20470 - protein, 55 aa, Artificial Sequence
  Synthetic
EEVRKDIERLFKELEDILKEIKEDNRRLVEDIKRSLEKNKRDLEKLVKESEDEER

SEQ ID NO: 20471 - protein, 60 aa, Artificial Sequence
  Synthetic
DEVRKVLEDARRLVEKLERDLEKVLEDYKRLVDELKERNERSHRESRRLAEELKKELERE

SEQ ID NO: 20472 - protein, 55 aa, Artificial Sequence
  Synthetic
DEVKERIDRLVKRLEDLARRIKEELDKLVKESRESLERNKTEVKKLIRELEETVR

SEQ ID NO: 20473 - protein, 60 aa, Artificial Sequence
  Synthetic
SEVEDVLTKIEDVVRKLEEENKRSHDESRKLADELKKENKEDHDRYRKEVERLKKELEER

SEQ ID NO: 20474 - protein, 55 aa, Artificial Sequence
  Synthetic
DKVRKRVEELVKEIEKSARDNEEAVKRLAEELRDSARRNKEELEKLVKESDDELK

SEQ ID NO: 20475 - protein, 56 aa, Artificial Sequence
  Synthetic
RETEEIEKEIRRLVKELRELNDEVEDRVRKLIKELKELNDRSERTLRELADELRRS

SEQ ID NO: 20476 - protein, 59 aa, Artificial Sequence
  Synthetic
DDVVRKVLERAERLVREDKKHTKEVLERIKELVDRDKKHTRDVNEEVKRLVEEIKKKTK

SEQ ID NO: 20477 - protein, 56 aa, Artificial Sequence
  Synthetic
SEIEEIEKRIEDLARELKELNKEVEERVKKLIEDLRRLNEESRESTDRLMDELRKA

SEQ ID NO: 20478 - protein, 59 aa, Artificial Sequence
  Synthetic
DEVVRRVLEEIERLVRRDKEHTERVLRTIEKLVREDEEHTKRVNEEIRKLAKEIEERAR

SEQ ID NO: 20479 - protein, 56 aa, Artificial Sequence
  Synthetic
REIEELRKEIETLIRENEELNRRSKETSEELIRRLKKLNRDVEEEVRRLVKDLRDR

SEQ ID NO: 20480 - protein, 59 aa, Artificial Sequence
  Synthetic
DEVVRRVAEEARRLSKRNKDAIREVNETSRRLATRDAKHTRDVLREIKRLADEIRERTR

SEQ ID NO: 20481 - protein, 56 aa, Artificial Sequence
  Synthetic
SEIEKAEEDVKRLIKENEELNRRSEETSRKLVEENERLNKEVEDRVRKLIKELEDN

SEQ ID NO: 20482 - protein, 59 aa, Artificial Sequence
  Synthetic
DDVVRRILKRIEDLSRKNKRDIEEVNKESERLSRENKKKIKDVLEEIRRLVERIEREVR

SEQ ID NO: 20483 - protein, 60 aa, Artificial Sequence
  Synthetic
SEIEKVLEDLRRLADRHRKRVEEILREAEDSNRKTKKKHREVEKEVKELADKLKDEIRRD

SEQ ID NO: 20484 - protein, 58 aa, Artificial Sequence
  Synthetic
RRLDEVEKDLRRLIRELKRLNEEVEKRVRDLIKENEELNKRIHDDLRRLIKELEDETR

SEQ ID NO: 20485 - protein, 60 aa, Artificial Sequence
  Synthetic
SDIEKVLDDLRKLAEEIERAHEEVAREVRELSKRNKEVIKDILRRAKELAERIKELIDRS

SEQ ID NO: 20486 - protein, 58 aa, Artificial Sequence
  Synthetic
DDLRKVEETLRELIRKIRKKNEEIRRDLRRLIEENKELLERVRREVERLIEDIKRKLK

SEQ ID NO: 20487 - protein, 60 aa, Artificial Sequence
  Synthetic
SEIEKMLEELRRLSERNKRTTEEIEKRLRDSNRDTKRKHEEALRTIKELIDRIKRAIREE

SEQ ID NO: 20488 - protein, 58 aa, Artificial Sequence
  Synthetic
DKLRKAADDVRRLIEENRRLDERLHEEVKKLIEENRKLNEDINERVRRLIEELRRETK

SEQ ID NO: 20489 - protein, 60 aa, Artificial Sequence
  Synthetic
EEIERALREMRELSRTHKELVEKILRDIAELAKTHERINEDILRKIKKLIDEIADEIRKE

SEQ ID NO: 20490 - protein, 58 aa, Artificial Sequence
  Synthetic
RELDEIAKDVKRLIDENRELLKRVEDEVRRLIRKLEELNRRTEEEVKKLIKKLEDDLK

SEQ ID NO: 20491 - protein, 57 aa, Artificial Sequence
  Synthetic
RELEELEKELRELLRELRRLSEESRKELKKLLDELEELSRRSAKKLKDLLDDLRRRG

SEQ ID NO: 20492 - protein, 56 aa, Artificial Sequence
  Synthetic
IDEVRERLRELIERDKKLNKKLTDDLRRLAERDKRENEKLSKELEDLARKLREDAR

SEQ ID NO: 20493 - protein, 57 aa, Artificial Sequence
  Synthetic
SEIEELEKRIDELLKELRDLSRRIAEEVKRLLEELKKLSKDSEDKLRELLERLKRKG

SEQ ID NO: 20494 - protein, 56 aa, Artificial Sequence
  Synthetic
VEEVLRRLEKLVREDKERLKKVLKDARDLIKKDKDLNEKLSRELEKLVRELEERAR

SEQ ID NO: 20495 - protein, 57 aa, Artificial Sequence
  Synthetic
SEIEDLERRIRKLLEENRKLVDDVAKKLRELLRELRKLSEESRKRLEDLLRKLRKDG

SEQ ID NO: 20496 - protein, 56 aa, Artificial Sequence
  Synthetic
VEEVLRRLEKLSRENKDLIRRIDERIEKLIRDDKRRNREISERARELARKLEDEAR

SEQ ID NO: 20497 - protein, 57 aa, Artificial Sequence
  Synthetic
KESEELEKEIRRLLRELREISRKIEEDARRLIEELRRLTEESERELEELLEKLKRDG

SEQ ID NO: 20498 - protein, 56 aa, Artificial Sequence
  Synthetic
VREVLERLKKLVEEDKRRLKELLDRIRELMERDKRKNKEISERVRKLIKELEDKAR

SEQ ID NO: 20499 - protein, 56 aa, Artificial Sequence
  Synthetic
DEEDRLREELRRLLEELRELSERSRDEVKKLLEDLERLTRESEEKVRRLLEKLKRD

SEQ ID NO: 20500 - protein, 56 aa, Artificial Sequence
  Synthetic
VKRVLEELRRLVEEDKKLNEEITEDARRLIEEDRRLNKKISDEAEKLARELRERAR

SEQ ID NO: 20501 - protein, 57 aa, Artificial Sequence
  Synthetic
DELRDVKRELDRLLRENEEIVERIAETVRRLLEELKKLTKELAEELRKLLEELRKRG

SEQ ID NO: 20502 - protein, 56 aa, Artificial Sequence
  Synthetic
VETVLRRVRELSRDNKRRMRRVLEEAKRLAKEDKERIDKIRKEIEELIKRLKDKAT

SEQ ID NO: 20503 - protein, 56 aa, Artificial Sequence
  Synthetic
DEEEDLERRIKKLLDENRELLKRIAEELRRLLEELRRLTEESADRLRRLLKELKDR

SEQ ID NO: 20504 - protein, 56 aa, Artificial Sequence
  Synthetic
IETLLRELEKLSRDNKELLKKIEKEIRDLIKEDKERNRELSERLRKLVEELKKKAT

SEQ ID NO: 20505 - protein, 57 aa, Artificial Sequence
  Synthetic
REIEEAAKDLDRLLEENKKLVKEVEEELRRLLKENRDLVKESEDRIRKLLEELRRRG

SEQ ID NO: 20506 - protein, 56 aa, Artificial Sequence
  Synthetic
VEEVLRRVRKLSRENKEKIRKILEDVKKLSEDNKRRNEELSRRVKTLVDEIKKRAT

SEQ ID NO: 20507 - protein, 57 aa, Artificial Sequence
  Synthetic
SRIEELEKRIRELLKENRDLVKESEDRVEELLRRNEELVRRSKEKVERLLEELRRKG

SEQ ID NO: 20508 - protein, 56 aa, Artificial Sequence
  Synthetic
VDEVLRRLKKLSDDNKELNERLTRTLEELSRRNADINKKLSDEAEKLIRDLEKRAT

SEQ ID NO: 20509 - protein, 57 aa, Artificial Sequence
  Synthetic
KEIEDAERELRRLLEELKRLLDDVAREVKRLLDENKRLVEKSEEDVKRLLDELREEG

SEQ ID NO: 20510 - protein, 56 aa, Artificial Sequence
  Synthetic
VEEVLRRVRETVERVKKKIKDVLKEIEDLSRENKKLNRDLSERLKKLADDLREKAR

SEQ ID NO: 20511 - protein, 56 aa, Artificial Sequence
  Synthetic
DELEELSREIKKLLEENRRLVRESEEDLRRLNEENRKLVEDSERRVRELLKDLRDR

SEQ ID NO: 20512 - protein, 56 aa, Artificial Sequence
  Synthetic
IEEVRERLRKLSKENKDLNRELTKRSRELNARTKERNEEISRRAEELARKIREDAR

SEQ ID NO: 20513 - protein, 56 aa, Artificial Sequence
  Synthetic
DEKETLARKLDELLRELEKLVRDSAREVEKLNEENRRRLEESRDRLRKLLEKLKRD

SEQ ID NO: 20514 - protein, 56 aa, Artificial Sequence
  Synthetic
IERVDRELKRLAEEIKELNKRITDESRKLNEDTKRVNDKLSRDLEELARDLERRAT

SEQ ID NO: 20515 - protein, 57 aa, Artificial Sequence
  Synthetic
SEIERIERENDRLNEENKKITEDIERELKRLLEENRELSRTIEEELERLLRELRKRN

SEQ ID NO: 20516 - protein, 59 aa, Artificial Sequence
  Synthetic
EKTLRELLKRSEELSKENKDRLKKLLDDLREVSKKNKEDLKRLLREVREVARKVKERAN

SEQ ID NO: 20517 - protein, 57 aa, Artificial Sequence
  Synthetic
DDIERILREMERLLEENKEISDEIRKELKRLLDENRKLSEDVVKALEDLLRDLERRK

SEQ ID NO: 20518 - protein, 59 aa, Artificial Sequence
  Synthetic
KDTLRELARKIRKLSEENKERLKELLRELKKLSDENKERIKKLLKDAEKIIEDVRRRAK

SEQ ID NO: 20519 - protein, 57 aa, Artificial Sequence
  Synthetic
SEIERIDEDNKRLNDENRKLSDRVRRENERLNKENRELSKRVEETLKRLLDELRRRG

SEQ ID NO: 20520 - protein, 59 aa, Artificial Sequence
  Synthetic
KRTLTELLKESRELSKRNKDKIRELLRRSEKLSRENKKRIEDLLRELRRVVEKIKREAD

SEQ ID NO: 20521 - protein, 57 aa, Artificial Sequence
  Synthetic
KEIEDLRRDLDRLLRENRELTREVKEELEKLNRELEELVRRIKRTLDELLKDLERRN

SEQ ID NO: 20522 - protein, 59 aa, Artificial Sequence
  Synthetic
REEIERLREELRKLSEDNKDRIRRILERLRKTVEEIKKRLEDILRRLTEIAKEIEERAR

SEQ ID NO: 20523 - protein, 59 aa, Artificial Sequence
  Synthetic
SELEKLLEDLRRLSERSERELRRLRKELEEIIREIKKKMEENLERNRKVIDEIDKVIKD

SEQ ID NO: 20524 - protein, 58 aa, Artificial Sequence
  Synthetic
EEAKRLKEDAERLLRENERRIDELRKEADELIKELKKRIEDLVKESRRLLEELDRRAK

SEQ ID NO: 20525 - protein, 59 aa, Artificial Sequence
  Synthetic
EELERLEERLDRLIEEAERRLKDNLKKNEDMARKWEEDTKRNEKRNRDLIRRIRKVIKD

SEQ ID NO: 20526 - protein, 58 aa, Artificial Sequence
  Synthetic
RKVKELKRRARELLERLARLIDELRRRSEDLIRRLAEKSERLERESRKLLRDIAEKTT

SEQ ID NO: 20527 - protein, 60 aa, Artificial Sequence
  Synthetic
RELEELKKEAEKVSKESKDLIEKVIRDNEDVSRRSEELIRELMREVKEVIDRLRELIERR

SEQ ID NO: 20528 - protein, 59 aa, Artificial Sequence
  Synthetic
EDKVRRIKEELERLIEENEKLLEESKKRSEDNARRNEELLERLRRELERLARELEEELR

SEQ ID NO: 20529 - protein, 57 aa, Artificial Sequence
  Synthetic
REKEELKKDIERMVEELKKLNKESRDRTRKLIKELEDLVKESDDDTERLARKLEKEV

SEQ ID NO: 20530 - protein, 56 aa, Artificial Sequence
  Synthetic
VEDLLREARKLIEELKRHTEEVIKRNKKLIDELKEIIEDVIRRNRKLVKELEDTAK

SEQ ID NO: 20531 - protein, 57 aa, Artificial Sequence
  Synthetic
SEKEDLKRRLDKLAEDLRRLNKEVDDEVKELARRLRKLNKDSRKRTEDLIRELEKRV

SEQ ID NO: 20532 - protein, 56 aa, Artificial Sequence
  Synthetic
VDELREEIKELIDRLRKHTEEIIRRIRRLFEELRKHSKKVIDDNKRLFDELEKTAR

SEQ ID NO: 20533 - protein, 57 aa, Artificial Sequence
  Synthetic
KEKEDLKRKVDELDKELKKLNEDSRRKTKELIKRLKDINKRLREELEKLADELRKKV

SEQ ID NO: 20534 - protein, 56 aa, Artificial Sequence
  Synthetic
VEELDREITELIKELRRHTEEVIRRNEKLARELEKHSRDIMETIRELIRDLERTAK

SEQ ID NO: 20535 - protein, 57 aa, Artificial Sequence
  Synthetic
SEKERLEKRLREVVRELEKLNEDLDRRLEELARDLERLNEESRRESRKLAEDLKREV

SEQ ID NO: 20536 - protein, 56 aa, Artificial Sequence
  Synthetic
VEEVEERIERLIRDLKRHTEEIKKTIEELMKELREHSREIIKRSRDLFKELKDTTK

SEQ ID NO: 20537 - protein, 60 aa, Artificial Sequence
  Synthetic
SELEKVIEEIREISERSLEKIKRLMEKIKELSDRTAERLRRVLEEIRKIIEEIKELRDRG

SEQ ID NO: 20538 - protein, 59 aa, Artificial Sequence
  Synthetic
KELAKKITEDLKRNEERNRRAIEELERTLRKLEEENRRLIREAEDTLRRLVEELEKKDE

SEQ ID NO: 20539 - protein, 59 aa, Artificial Sequence
  Synthetic
SELEEVLKEAKRLIDEIRKHTRDVSERSKRLLEEDLKHTEEVIKEIRKLIKEILDRIRA

SEQ ID NO: 20540 - protein, 59 aa, Artificial Sequence
  Synthetic
EDDLRRLKETIERLAKDLERLNREHDETNKKLAKDSEDLNRELKKRVEELEEELRRALK

SEQ ID NO: 20541 - protein, 59 aa, Artificial Sequence
  Synthetic
KELEDVLKEIRDLARRIEEHSKKVLREIEELIRRLEEENREVLRRMREEIKKIKEDIRN

SEQ ID NO: 20542 - protein, 59 aa, Artificial Sequence
  Synthetic
KRKLDELRRDVRRLERRLERLNETLKERIDRLAERLEEVDRRLDEELKRLAEELKEELR

SEQ ID NO: 20543 - protein, 60 aa, Artificial Sequence
  Synthetic
DKLDEIKERIERLVETDLRVIKRILEEADELIKENEKLIEKILRDNRRLIEEVEEIIRRD

SEQ ID NO: 20544 - protein, 59 aa, Artificial Sequence
  Synthetic
EKKLRELKKRVDELREESKDLNDKLEKRIRDLKRELKKLNDRHEEELRKLKERLRRATK

SEQ ID NO: 20545 - protein, 60 aa, Artificial Sequence
  Synthetic
DELDEILKTADKLAEDDLDTIRRLLEEVRDLVRKDKEVIKRILEEIDRLIKEVEDIIRRD

SEQ ID NO: 20546 - protein, 59 aa, Artificial Sequence
  Synthetic
EKKLKELEDRVRELKRRSEELLKKVEETLRRLKEESRRLNEELERTIRELEERLRRATK

SEQ ID NO: 20547 - protein, 56 aa, Artificial Sequence
  Synthetic
SKEDRAREELKRLKEELEKLLEEHRKTLEDLNRELKRLVDEHEKSIRELRKELKDS

SEQ ID NO: 20548 - protein, 56 aa, Artificial Sequence
  Synthetic
IDDVIRRVRETIDEVVRRIEELLEENRKLIEDLEEKIRRLNERLKRLVEEIKERDR

SEQ ID NO: 20549 - protein, 56 aa, Artificial Sequence
  Synthetic
SERERVREEVRKLLERLRELLERHRRKLEKLNRELEKVLEDHRRTLERLKEELERS

SEQ ID NO: 20550 - protein, 56 aa, Artificial Sequence
  Synthetic
IDTVLEEARKLIEKAERDIRRLAKENEKTIEEVKERLKKLMEENKRLIEEIKERTR

SEQ ID NO: 20551 - protein, 60 aa, Artificial Sequence
  Synthetic
SEIEDLLRRLKEVADEIKERLKKLSEESEELVRRVKRRIEELNKENREVMKEIKRRIDSG

SEQ ID NO: 20552 - protein, 59 aa, Artificial Sequence
  Synthetic
EEDVRRLAEDIRRLLEEIEKLLKEHEEKNRKLKKELEDLVRRHRKSVEDLKREIRERSR

SEQ ID NO: 20553 - protein, 56 aa, Artificial Sequence
  Synthetic
DDEERLEETLERLERELKKIADEHRRRNEELRDTLRRIAEELRKTHKDLLERLEEE

SEQ ID NO: 20554 - protein, 59 aa, Artificial Sequence
  Synthetic
KRVVEEVERKLRRLMDRIREELKRLTDESEDLVTKILDTVRRIVESIKKLVDELREERK

SEQ ID NO: 20555 - protein, 60 aa, Artificial Sequence
  Synthetic
DEAERLLERVDKAHERSEELLDRVLKENRKVLEEIRKLADDLRKLLDDIMRRIEDLVRKE

SEQ ID NO: 20556 - protein, 59 aa, Artificial Sequence
  Synthetic
DRDLREIERRLKEIEEENRKLVKRLEDENRKIAREVEKLVERLERRLREIARRVEESVR

SEQ ID NO: 20557 - protein, 56 aa, Artificial Sequence
  Synthetic
REKEELKKSIERVKRELERLLEEHRKRSEELKRRLEELLKDHKRRTDEVLKEAKDK

SEQ ID NO: 20558 - protein, 56 aa, Artificial Sequence
  Synthetic
VDTLEEEIKDIIRDVKRAVKESLEEDDRLAKEVEDMVRKSKEEVERLIEKVKRDTD

SEQ ID NO: 20559 - protein, 56 aa, Artificial Sequence
  Synthetic
REKEELEKEIERIKREIKKMLDELKRHSEELKRRAERLLEEHRRETERIIREMRES

SEQ ID NO: 20560 - protein, 56 aa, Artificial Sequence
  Synthetic
VKTLLEEIRKILKEVEDRIREILREDKRLADELEKAVRDSLREVKRILDEVREAVR

SEQ ID NO: 20561 - protein, 56 aa, Artificial Sequence
  Synthetic
DEDKRLADEIKRVLDELKKSVKEHRDHSEELLRRAKELLKRHEDETRKIEEEARRN

SEQ ID NO: 20562 - protein, 56 aa, Artificial Sequence
  Synthetic
VETLKREIEELIRRAKKVNKESKEDDRRLADEVRKVVERSEETVKRLRDEVTERVR

SEQ ID NO: 20563 - protein, 56 aa, Artificial Sequence
  Synthetic
REKEELEKELRRIKRELEKILEEVRKRSKELLDRLRELLRRHEAETEKAIEEMERA

SEQ ID NO: 20564 - protein, 56 aa, Artificial Sequence
  Synthetic
VDKLLRDVREIAREAKRVIRRILKTDEDLARELEEIVRRSLKKVEDLIRKVKEDAR

SEQ ID NO: 20565 - protein, 60 aa, Artificial Sequence
  Synthetic
SEEEKLEEIIRRSRKRLKELIDRLRELVKKIDDDLKRLLDEHRRRLEESERRAEELLKKV

SEQ ID NO: 20566 - protein, 56 aa, Artificial Sequence
  Synthetic
VEKVLKELEESSRRVVELIKKLMRELEKLLRDVEERAKDLLRKNTRSSEELEKRIE

SEQ ID NO: 20567 - protein, 60 aa, Artificial Sequence
  Synthetic
SEEEKLKKLLDESEKRLREILKRHEEIVRDIKRRLEELLKRHKELLDRSLKRLEELLKEN

SEQ ID NO: 20568 - protein, 56 aa, Artificial Sequence
  Synthetic
VEELLERVKKSSEDVAREIRKLARDNERLLEEVKRLIRKLLEENRESSKDVEDKIR

SEQ ID NO: 20569 - protein, 60 aa, Artificial Sequence
  Synthetic
SKEEELRDKLRKIRKRLEELLERLAREIDRIRRALEDLLRRHKEELDRSRKRAEELLKEI

SEQ ID NO: 20570 - protein, 56 aa, Artificial Sequence
  Synthetic
VDRVLEELDRLLKEVEETIRDLARKLRELLKRVEDTLRKLLKENKDSSRRLEEEIR

SEQ ID NO: 20571 - protein, 60 aa, Artificial Sequence
  Synthetic
SKEEELARMIEESVKRLKKLLDDLRKVIKESKDRLKELIDDHRRILEEIRRELEELLKKK

SEQ ID NO: 20572 - protein, 56 aa, Artificial Sequence
  Synthetic
VDKLLKEIEDSSRKLAEEIKKLIDEIRESSKEVIERVRRLLERNKELVRKVKEEIR

SEQ ID NO: 20573 - protein, 60 aa, Artificial Sequence
  Synthetic
SEVEKLEEEIKKINDEIRRLSDKNLEDLKRILEEIEDLSRRNLKKTKDILREIEEEAKRR

SEQ ID NO: 20574 - protein, 59 aa, Artificial Sequence
  Synthetic
DEFAERLKRSLEDSKRTSKELVDENRKLNEELERTVRKLIEDNKRLNDRVEKRVKELAD

SEQ ID NO: 20575 - protein, 58 aa, Artificial Sequence
  Synthetic
SLEDEIRRLIEEIKRKLKELLERLKEEIDRIREELKKSNRKLDELSRRIEEEARKRVG

SEQ ID NO: 20576 - protein, 59 aa, Artificial Sequence
  Synthetic
EEKIERVLREMEKLLRELERIAREVLKEIEKILRENKKHNEEVMERNKRLAKELKEKAD

SEQ ID NO: 20577 - protein, 58 aa, Artificial Sequence
  Synthetic
DLEREIDELIKDIARRLEESNRELEKLVRRIEEELRRSNKELEDLSRRIKTELRKEVG

SEQ ID NO: 20578 - protein, 59 aa, Artificial Sequence
  Synthetic
EEKAKRVADEIRKILRENEEHNEEVARRIEEILRRNKKHNKEVADKNRELLKKLKEEAR

SEQ ID NO: 20579 - protein, 56 aa, Artificial Sequence
  Synthetic
KLVEEIRKSAEDNRRRLEKLVRESKKSLDDNERENRKLVDELRKIATKIKEDLERD

SEQ ID NO: 20580 - protein, 59 aa, Artificial Sequence
  Synthetic
KEAVDKLEEENKRDHDEYKKVVDELKKENKEDHERSRKLAEDLKRLLEDIRRRIKETRR

SEQ ID NO: 20581 - protein, 59 aa, Artificial Sequence
  Synthetic
DEVEKLIEDLKEVTKKHAKRVEETNRHNEDVLRKVAKEVKRILDDVKRVVDEVKKVVDA

SEQ ID NO: 20582 - protein, 59 aa, Artificial Sequence
  Synthetic
DKAKKKLEDVLKRSREEIERLKDDSRKSVDETRERLKKLKEDLKRLLEEVRKEVEKLKR

SEQ ID NO: 20583 - protein, 59 aa, Artificial Sequence
  Synthetic
SEVEKLIKELRDVLKKVAEDVEKTNRDLEEVSKRSAEKVKKLEDELEKVLREVEELVKN

SEQ ID NO: 20584 - protein, 59 aa, Artificial Sequence
  Synthetic
RKAEEDLRKVLTEIRKRAEELRRESDESVKRSRKELERLLREIEKRVEEIEDRARKAKK

SEQ ID NO: 20585 - protein, 56 aa, Artificial Sequence
  Synthetic
EEVERIIEEIRDEVKKAAEKVEKVLKESREISKRAEDEVRRVLDEIRKLDETLRDA

SEQ ID NO: 20586 - protein, 56 aa, Artificial Sequence
  Synthetic
REKLRKVLDEIRREIERLKERLDRLDEESDRKSEKLKEDLERLLREIEKRIRDERR

SEQ ID NO: 20587 - protein, 56 aa, Artificial Sequence
  Synthetic
DEVRKVLEEIKELLKRLAEKVKKLIKESREISKRAAEKVKRLIEKSRRLLDTLEKA

SEQ ID NO: 20588 - protein, 56 aa, Artificial Sequence
  Synthetic
KDTLKTVLDTIKKKIEELVKELREVDEESKKRSKELKEEMDKVDEDIKRAIERRTR

SEQ ID NO: 20589 - protein, 56 aa, Artificial Sequence
  Synthetic
DEVRKVLEDIKRDLDRLAKRVKDVLREIEELTKEAARTVKKVIEESRRLLRKLKEA

SEQ ID NO: 20590 - protein, 56 aa, Artificial Sequence
  Synthetic
REDLTELLKRIEEKIKRLVEELERLLKRSREESKRLVEEMEKVNREIEEEIKKRAT

SEQ ID NO: 20591 - protein, 60 aa, Artificial Sequence
  Synthetic
EEVERLLKEIKDLLDEVARENKEALKRSKELLEEVAEDNKRVLREIEKLLEDVERKVKDE

SEQ ID NO: 20592 - protein, 59 aa, Artificial Sequence
  Synthetic
KELLKELEDLLRKARKTVEDLDRELEELNEEIRKALEELDKELERLVREIRKRLEDARR

SEQ ID NO: 20593 - protein, 60 aa, Artificial Sequence
  Synthetic
REAEELLKEIERLLREVERENKKALEDSRRLLEEVAEEVKKVLREIEELLKTLEELVRKE

SEQ ID NO: 20594 - protein, 59 aa, Artificial Sequence
  Synthetic
EELLRELKRLLEEIERRVRELDEELRKLNEDIKRELERLIRELEELLKRAEETLRRLKD

SEQ ID NO: 20595 - protein, 60 aa, Artificial Sequence
  Synthetic
SEVEDALRRLKELLRRVAEENRKVLEESKKLVEDARRKNEEVLKEIEKLLEDVAREVKDR

SEQ ID NO: 20596 - protein, 59 aa, Artificial Sequence
  Synthetic
EELLRELKKLLEEIKKSVEDLDRELKKLNDEIRDESRKSKEELERLLEDIERALRELAR

SEQ ID NO: 20597 - protein, 60 aa, Artificial Sequence
  Synthetic
SEAEEVLRRIEELVERATRTVEKLAEESKRLLEKLAEENKRVLEEIKRLLDEVADKVRKK

SEQ ID NO: 20598 - protein, 59 aa, Artificial Sequence
  Synthetic
KELLDELKTLLDEITKRLKDLTDKLERLNDKIRRELERLDEELRELLERIREEMEKLTR

SEQ ID NO: 20599 - protein, 60 aa, Artificial Sequence
  Synthetic
DLEEELKELLERIRKAHEELIKELEDLTEKIERDHEKLIKRLEDLLKRIEDEMRKLLEEI

SEQ ID NO: 20600 - protein, 59 aa, Artificial Sequence
  Synthetic
SRTVKEILKRIEDSLRRAAKKVKDLAEENKDSLRRVAEKVERILEELKRLLEEIARRVK

SEQ ID NO: 20601 - protein, 60 aa, Artificial Sequence
  Synthetic
SLEEKLEDLIRRLKESNERLKRELERLIEELRKNNERLLKELDDLVEEIERALRDLLREK

SEQ ID NO: 20602 - protein, 59 aa, Artificial Sequence
  Synthetic
SRKVEKILKDAKDSNKKVADTVREILKRARDSNKRVAERVKDLLRRLRELLKELAERVK

SEQ ID NO: 20603 - protein, 60 aa, Artificial Sequence
  Synthetic
DLEEELKELIKRIRDAHRELKERLDKLVEEIKRNNEKLSDDVRRLVREIEKELRRLLEEI

SEQ ID NO: 20604 - protein, 59 aa, Artificial Sequence
  Synthetic
KEKVKKLLKELEESLKRVADEVKRLLEELERSNREVEKRVRELLEEARRLLKDLADKVR

SEQ ID NO: 20605 - protein, 60 aa, Artificial Sequence
  Synthetic
DLERELRELIKRIEDDIRKNVKRNEESIRKTEDELRKNVRENERLIEEMRKELEKLRRRN

SEQ ID NO: 20606 - protein, 59 aa, Artificial Sequence
  Synthetic
EEVARKLLDELREIKKRINDTSRTTLEDNKRLAKEIHDSSKESLKRLKKILDDIREEAR

SEQ ID NO: 20607 - protein, 60 aa, Artificial Sequence
  Synthetic
RLAEELRKLIDKVRRDLDRNRETNRELIKRAKDELRKNEEENRRIIDEIRRALEDLTRKN

SEQ ID NO: 20608 - protein, 59 aa, Artificial Sequence
  Synthetic
EEAVRKVKKEIEDIVREIHKLSKRTLEELERIVEKIHEDSKRMLERVKKLLDKIRRDAE

SEQ ID NO: 20609 - protein, 60 aa, Artificial Sequence
  Synthetic
SLAEELRKLIKRVEDEIRRLAEENKDLIRKARETIRKNEETNREVITRIRREIEKLEKDN

SEQ ID NO: 20610 - protein, 59 aa, Artificial Sequence
  Synthetic
EEVVRELLKEIRKVLEDIRRESKTSLDDIRRLLKEINDLSEETIREAEELLDRIRKKAT

SEQ ID NO: 20611 - protein, 60 aa, Artificial Sequence
  Synthetic
SLREELKRLIDESRKSLRENEERNKKSIDDTRRLLRENERRNRETIKELKKTLDELRRRS

SEQ ID NO: 20612 - protein, 59 aa, Artificial Sequence
  Synthetic
KEAVDRLLERIRRINEEINRTSEKTLEENDRLVKELHERSERLLRKLEELLRKIDETIR

SEQ ID NO: 20613 - protein, 60 aa, Artificial Sequence
  Synthetic
SLAEELRRLIEEVKKRLKELEDRNRKLIKEARDELKENEETNRKTIEDIERTLEKLERDN

SEQ ID NO: 20614 - protein, 59 aa, Artificial Sequence
  Synthetic
EEAVRDLLRRIRELLRDLERLSEESLRKLKEIVEDIHRKSKTMLDKLRKMLEELRREAT

SEQ ID NO: 20615 - protein, 60 aa, Artificial Sequence
  Synthetic
SLAEELKRLIEESRKSVEELERRNRKLIEDARRDLERLARENRKLIEEIRRRLKDLAKDN

SEQ ID NO: 20616 - protein, 59 aa, Artificial Sequence
  Synthetic
EEVVRRLLEEIKRLNDEAKRKSKESLDRLREILKEIRKTSERTLEKLKRILDRIREEAT

SEQ ID NO: 20617 - protein, 60 aa, Artificial Sequence
  Synthetic
SEIEELLERIRDLMRRINKKSEDHLRELEKILREIRRLAEKSNEEIERLLRELEDLAEKR

SEQ ID NO: 20618 - protein, 60 aa, Artificial Sequence
  Synthetic
MKDLKKTLDDLLDELRKDIERNVKENRDTLKRIEDDIRRLAEENKKLLEEVRKKIEELET

SEQ ID NO: 20619 - protein, 60 aa, Artificial Sequence
  Synthetic
SEIEELLRRLEDILRRIEELIRKVLKELRDLVEKSNDLSRRHLEDAKRILKEIEEEVKRR

SEQ ID NO: 20620 - protein, 60 aa, Artificial Sequence
  Synthetic
VEELRRRLRKILEDIRKRIEELVEELRRLLKEWEEESKKNDETNREVLKRIEDRIRELER

SEQ ID NO: 20621 - protein, 60 aa, Artificial Sequence
  Synthetic
DEAEEIKERIKKVVEDLERKVRELLRRSEKLAEDLHELSKENIERMKRLLEELEDLVRKR

SEQ ID NO: 20622 - protein, 55 aa, Artificial Sequence
  Synthetic
EEIEDLLRKVEERIRELEEELRRLNKKIEEEVRRNKDENRRVNEEIERRIRELAR

SEQ ID NO: 20623 - protein, 60 aa, Artificial Sequence
  Synthetic
DESKEILDRIRKVNEDLRRLAEELLKDSRRVVEEAHKLSEDNIRRLEELLKEIEKEVRRR

SEQ ID NO: 20624 - protein, 55 aa, Artificial Sequence
  Synthetic
DKIRKLLEDSKKTSDELKEELDRLNEEIERSVRDNKRRNEEVNKRIEDEIRKLAT

SEQ ID NO: 20625 - protein, 60 aa, Artificial Sequence
  Synthetic
SEAETILEKIRRANEELNRLSEENIRKSRKVVKELHELSKENIKRARDLLREVKKLVEKR

SEQ ID NO: 20626 - protein, 55 aa, Artificial Sequence
  Synthetic
ESIKELLKEVEDDVRKNKEENKKVNKEAEDEVRENKERNTRVNKEMEEEIKRLAK

SEQ ID NO: 20627 - protein, 61 aa, Artificial Sequence
  Synthetic
SERERLERLVREAAKELKRLLEELERLHKKIDEDLKRSNDRLRELHERIKKDIERLLRRIG

SEQ ID NO: 20628 - protein, 56 aa, Artificial Sequence
  Synthetic
VEEILKEIEDILRKVKEDVKRVLDENRRVLEENKEHAERILRENKRMLEELRREAK

SEQ ID NO: 20629 - protein, 61 aa, Artificial Sequence
  Synthetic
DSEERLRKLMREAREELKELLRRLRELHEEIRKRVEELLRRLEELSDKLRRDLERLLREIG

SEQ ID NO: 20630 - protein, 56 aa, Artificial Sequence
  Synthetic
VEELLKTIKELVDRLRRIVEKVLDENRRLLKRLEEEIKRVLDENREMLDRLRKAAE

SEQ ID NO: 20631 - protein, 61 aa, Artificial Sequence
  Synthetic
SKEETLEKLVREVKDRLKKLLEEVRRLTEELERELKKLREELEELSKELEKDLRRLKKRVG

SEQ ID NO: 20632 - protein, 56 aa, Artificial Sequence
  Synthetic
VEELLKRIKELLEELERRVEEVLRRNRELLKRLEETIRKVLEENKKLLKEVREDAK

SEQ ID NO: 20633 - protein, 61 aa, Artificial Sequence
  Synthetic
DKEEELRRLVEEVEKRLRELEKELEDLTDKIEKRLRESNERIKKLSDDIRRRLEDLLRKVG

SEQ ID NO: 20634 - protein, 56 aa, Artificial Sequence
  Synthetic
VEELLKRIRDILKRVEEIVKEVLERNRKVLEDNERHAEEVLRRNKRLLEELEKRAT

SEQ ID NO: 20635 - protein, 61 aa, Artificial Sequence
  Synthetic
SKEDDLRKIVKEIEEEVRKLLKELEELTKELEDRLRESNKTLKELNERIKRRLEELLRRIG

SEQ ID NO: 20636 - protein, 56 aa, Artificial Sequence
  Synthetic
VEEVKKELEDLLRRLREEVKRVLDDHRRILKENEDHAREVLKRNKELLRKLEEEAK

SEQ ID NO: 20637 - protein, 61 aa, Artificial Sequence
  Synthetic
SKEERLKKLVDDVRKTAEKLKRDLERLTKEAEETLERLKRELDRLNREIAEEIKKILDRVS

SEQ ID NO: 20638 - protein, 56 aa, Artificial Sequence
  Synthetic
VETLLEEIERKLREVEKRIREVLKRHRELLRRLRETIKRVLERNKELLDRLREAAR

SEQ ID NO: 20639 - protein, 61 aa, Artificial Sequence
  Synthetic
SKEETLKKLMDRAEEELRRLKRELEELNDRIREALKKLNEDLRRLHEKIKEDIRKLLEEVD

SEQ ID NO: 20640 - protein, 56 aa, Artificial Sequence
  Synthetic
VEELLETIERILEEVRRRIEKVLEENKRLLDENKKHAEESLKKNKELLKRLRDAVK

SEQ ID NO: 20641 - protein, 59 aa, Artificial Sequence
  Synthetic
SEVDEVRERLERLLRTVERVVERILRELKRLNDELRKIAEDLLRENKDLLRELAERVRK

SEQ ID NO: 20642 - protein, 59 aa, Artificial Sequence
  Synthetic
SEALKDIEKLVRKIKEELKRLLKEVAETLERSERSLDKLIEDHRRLVEDIERALKELRK

SEQ ID NO: 20643 - protein, 60 aa, Artificial Sequence
  Synthetic
SEVEKVLETIKDLLRKLEEIVKKILDEDRKLMEKVTKIVEDLLEENKRLLEELERLAREG

SEQ ID NO: 20644 - protein, 59 aa, Artificial Sequence
  Synthetic
SELLKRIRELVKEVKDRLRRLREELEESVRRARKTLEDLERRHRKLLKDIRETIKELIR

SEQ ID NO: 20645 - protein, 55 aa, Artificial Sequence
  Synthetic
DLDREIERLVEELERRLRELLRRNEELVKRVEDELEKLKRESEKLLRELRKKLEE

SEQ ID NO: 20646 - protein, 59 aa, Artificial Sequence
  Synthetic
KEAVDKLLKELKDILKKLEELSRKSMEDIKDILRRYEKLVKELLDELKKILDELDRADK

SEQ ID NO: 20647 - protein, 55 aa, Artificial Sequence
  Synthetic
DLKDEIEELVKRARERLERLREESEEIVKELEKVLRDLEKENRDLARRLRDELRK

SEQ ID NO: 20648 - protein, 59 aa, Artificial Sequence
  Synthetic
EEAVRRLKDELRRILEEYERVVEELKKRLKDLLREAERLSKESLDELKRILRKLKEDAK

SEQ ID NO: 20649 - protein, 60 aa, Artificial Sequence
  Synthetic
SLEDELRRLVEEDERNIRKLNDENRKSVRKLEELLRRLNKRNRETIERIKRLLDRLREES

SEQ ID NO: 20650 - protein, 59 aa, Artificial Sequence
  Synthetic
KEEIDRILRKVERLSRKAHEDVRRINEELEKLLEKLKREVKRENDRVEEEAKRLADEVK

SEQ ID NO: 20651 - protein, 60 aa, Artificial Sequence
  Synthetic
REVDELVKRIEELLREMKKKNDESLKDSRDLLRELEKRVERVIEEIEKLLRDLEELVRKE

SEQ ID NO: 20652 - protein, 56 aa, Artificial Sequence
  Synthetic
EKRLKKLLDELRDMSRKADRALRELNKDVARKIEELRRRLKKLLDEVKERADELTK

SEQ ID NO: 20653 - protein, 60 aa, Artificial Sequence
  Synthetic
SEAEKLLEDLKRLVEDLRRKNKKLNDDNERLTTELEKTSRKLLEELKRLLEKVADDVRRT

SEQ ID NO: 20654 - protein, 58 aa, Artificial Sequence
  Synthetic
ELKERLDRLLEEVKKTIRELEKRNRESHKRTKDVARRSAEETKRVLEKIEDDLRKLDK

SEQ ID NO: 20655 - protein, 60 aa, Artificial Sequence
  Synthetic
SEAEKLLKEIKDLVDELRKRSKELIDENKRLTEEVEERARRLLTELRKLLKRLEELVRRE

SEQ ID NO: 20656 - protein, 58 aa, Artificial Sequence
  Synthetic
ELEERIRRLLREIEKEAKRSRDRSREVHRRTDEELRRLEREIKEILKEIKRKLDELRR

SEQ ID NO: 20657 - protein, 59 aa, Artificial Sequence
  Synthetic
SDVDRLLKENRDVSKKVEDDVRRLLEELKRISEEIARRVKRLLEELRRILREIEELVKK

SEQ ID NO: 20658 - protein, 59 aa, Artificial Sequence
  Synthetic
DELRRRAEKSIEDNERKLRKLEEDAKRIIDDNERILRDLERRAKDVIREVRKALEDLKR

SEQ ID NO: 20659 - protein, 60 aa, Artificial Sequence
  Synthetic
DEAEKLLEEVKEENRRVNEDIKRVIEEIKKLIDESRRLMEKIIRDVEALLTRIRDVVEKL

SEQ ID NO: 20660 - protein, 59 aa, Artificial Sequence
  Synthetic
EDVRREIERIMRELKKNLDRLEEEIRRIADELRRVNTRLEEEIKRVIDEARKTLEELRR

SEQ ID NO: 20661 - protein, 60 aa, Artificial Sequence
  Synthetic
SKEERLEEILRRHKKSLDEIRKELRKLLEDHRKSIEDLIRKLRELLERLKELLERLERSG

SEQ ID NO: 20662 - protein, 56 aa, Artificial Sequence
  Synthetic
VDRLITEIKRINEELRESVRRLLERAKRIDEELRRTAEELVKTIEKLAKELEETVR

SEQ ID NO: 20663 - protein, 61 aa, Artificial Sequence
  Synthetic
DEIEEVVERIRRIDKELNKRAEEVIRRNKELDERLNREIERVKEEIRRLIKRLEEVTRRDL

SEQ ID NO: 20664 - protein, 59 aa, Artificial Sequence
  Synthetic
EEAKKKLEDLLEEHERNLRKIERDLEELNERHERNLRKLKRELEEILKRAKEVLDELRK

SEQ ID NO: 20665 - protein, 61 aa, Artificial Sequence
  Synthetic
SEIEKVLREIEEIDKRLNKEVEDVLRENRRVDEELNRHSERVREEIERLVKRLDDVAREEL

SEQ ID NO: 20666 - protein, 59 aa, Artificial Sequence
  Synthetic
EEMKKTLEKLLREHEENIKELKRRLEELNEEHERNIRRSEETLKKLLKEAEDRLREIKK

SEQ ID NO: 20667 - protein, 60 aa, Artificial Sequence
  Synthetic
EEAERVLKRIADLIEELKRHSEEVSRRSKKLLDDLSRHTEKVSKESEDLLRRLEELARRG

SEQ ID NO: 20668 - protein, 59 aa, Artificial Sequence
  Synthetic
REIEERLRTLRRRLERMVEEIERLNEENLRRVEKRVRELEKENEDNLREAKKLLDEIRR

SEQ ID NO: 20669 - protein, 60 aa, Artificial Sequence
  Synthetic
SEVEEVLKDIERLIKELREENKRSLDRSRRLAEDLERRNRESLRRIEKLLRELEKIARDL

SEQ ID NO: 20670 - protein, 59 aa, Artificial Sequence
  Synthetic
EEVRKRAEDVLRRLEEVIKELEKTNEDAKRELKRLIDELRRTNEEVNKRLEERLDKIRE

SEQ ID NO: 20671 - protein, 60 aa, Artificial Sequence
  Synthetic
SEVERVLKDIERLLKELEERNRRSLEESAKSTRKVEEDNKRSLDKSTELLKRLEEDAKDD

SEQ ID NO: 20672 - protein, 59 aa, Artificial Sequence
  Synthetic
EEVRKRAEDVRRRLEEILKRLKETNEDMKRENKRVLDELRKTNEDAEKKLRDLIRKLRE

SEQ ID NO: 20673 - protein, 60 aa, Artificial Sequence
  Synthetic
SEVEKVLKEIDELIKDVERTNRESLEESERLLEKLKRENERTVERSERLAEELERLAREL

SEQ ID NO: 20674 - protein, 59 aa, Artificial Sequence
  Synthetic
EEVKDRADKLLRRLEEMVEKIRRTNETLLRALEKLIRDLKRNNEEVEKRLREIAKKIRD

SEQ ID NO: 20675 - protein, 60 aa, Artificial Sequence
  Synthetic
SEVDELLKRLKKLLEDDKRLAEELLKTIEKVNDDTRKRSEELLRRLERALEELEKLVRKV

SEQ ID NO: 20676 - protein, 59 aa, Artificial Sequence
  Synthetic
EEVKRRLEEVLREIKRLVDETRKELRRIDEESKRLAEKSRRDSRRVEERLRTLLEELRK

SEQ ID NO: 20677 - protein, 60 aa, Artificial Sequence
  Synthetic
SEVEKLLEDMERLLKEDEELVRRLSKRSEEIVRDDRRRNKEILDEIRKLLEELKRLADRL

SEQ ID NO: 20678 - protein, 59 aa, Artificial Sequence
  Synthetic
KDVEERLRRAEERIRRAVERTRDHARRNHEKLKELVKETRESNDRLKKEIRKLLEELRK

SEQ ID NO: 20679 - protein, 60 aa, Artificial Sequence
  Synthetic
EEEERIREVKKRSEDLLEELKRSNERVERESDKLAEEIRRKLEELARRADEVIRRLRARK

SEQ ID NO: 20680 - protein, 56 aa, Artificial Sequence
  Synthetic
TEKLLEDLKRINKETERLNRELLRDLERINEETRERIDRLLRELERMIDELRKRVD

SEQ ID NO: 20681 - protein, 60 aa, Artificial Sequence
  Synthetic
SERERAEEIRKRSEDVVREMRESNKDVSRKSEELAKKLREDLKRVEKKVRELLEEIKREK

SEQ ID NO: 20682 - protein, 56 aa, Artificial Sequence
  Synthetic
TEELLKRLEEISRRSRELNRRLLEDLKRINKETKERADKLLEDLERLLEDIKRRVD

SEQ ID NO: 20683 - protein, 60 aa, Artificial Sequence
  Synthetic
DEDERLKEVEEESKKVADELRDRLRRLMEESRRRLKRLREEAEEIKRELDTIAEDLKREK

SEQ ID NO: 20684 - protein, 56 aa, Artificial Sequence
  Synthetic
TEEILRRLEEISEESERRVEKLLRENKEINEETDRRVKELLERLKEVLERIERRVK

SEQ ID NO: 20685 - protein, 60 aa, Artificial Sequence
  Synthetic
DERERLREVLERSRKLAEDLRRSNEELERRSRELAKELRKTNKELEKRLKDKADDLRREK

SEQ ID NO: 20686 - protein, 56 aa, Artificial Sequence
  Synthetic
TERLLEELERISEESKRRNDELLEKNERVNEETRRRNEELLDELRRLLEEVERRVK

SEQ ID NO: 20687 - protein, 59 aa, Artificial Sequence
  Synthetic
DIEERIREVLRKARRVLERSEERSRELVERLRRVLEDSRRRTKRLTEEAKELLDEVRKR

SEQ ID NO: 20688 - protein, 59 aa, Artificial Sequence
  Synthetic
KKLVEDLLREIEKIIKEIEDTTKRVVDELRRLLEEIKRTSDELEKEVRKLLEEIKRATD

SEQ ID NO: 20689 - protein, 60 aa, Artificial Sequence
  Synthetic
STREALKELIDRLRDLVRRIRDKHRKLLEEIKRVLDESERRHRELIKRVEELLRDLARRV

SEQ ID NO: 20690 - protein, 56 aa, Artificial Sequence
  Synthetic
VETIIRRAEEALKRLEDSSRKVEETIRKVLEDLRRSSEEVAERVRRVLERLEEKAQ

SEQ ID NO: 20691 - protein, 60 aa, Artificial Sequence
  Synthetic
SSEERLRKVIEDLKRLAEESRKRHKELIDELRKAVERIERRHKKLLDEIKKVVDDIRRRV

SEQ ID NO: 20692 - protein, 56 aa, Artificial Sequence
  Synthetic
VDTIIEEVKRVLEELKRSTEEVEKRVRDAIEELERSSEELARRIKEVLKRLEEETR

SEQ ID NO: 20693 - protein, 60 aa, Artificial Sequence
  Synthetic
SAEEKLDRLRKEVERLSDETRKELERILKKVEDVIRETRRRAKELEEELRRLIRDIEEKL

SEQ ID NO: 20694 - protein, 56 aa, Artificial Sequence
  Synthetic
IETVIREIERLLEEDRKAVEEILRRIEKLIEDDKRAVDRIVKEIKDILDKLREETR

SEQ ID NO: 20695 - protein, 60 aa, Artificial Sequence
  Synthetic
DIEDELRKLEEEIRRVIEKWKRLTEENRRENERVIRKWDKLSKDLADEIRRVIEDARRKL

SEQ ID NO: 20696 - protein, 59 aa, Artificial Sequence
  Synthetic
KELVKELVDRVKRLIREIEKEARRTSEENKDLLKKIEDDAKRSEDELRELIKEIKKRID

SEQ ID NO: 20697 - protein, 60 aa, Artificial Sequence
  Synthetic
DIEDTLRKLAEDIKKVERDMEESNRRNREKNREVIEKWKKLSDDLERELEEVIEDARRKL

SEQ ID NO: 20698 - protein, 59 aa, Artificial Sequence
  Synthetic
RELVRKLIEDVRRLIEEIRRENKESSDRNKRLVEEIDERAKRSADELKRLLKEIRDRID

SEQ ID NO: 20699 - protein, 60 aa, Artificial Sequence
  Synthetic
DIEEALDEVRKEIEEVIRRWKKLTRENEEENRKVIEDIRRRLDELRREIEKVIRDARRKL

SEQ ID NO: 20700 - protein, 59 aa, Artificial Sequence
  Synthetic
RELVKKLIDDIRKLIDEIRRDAERTSRDNKRLVEEIERTIEKLIREVKELLERIKEEID

SEQ ID NO: 20701 - protein, 60 aa, Artificial Sequence
  Synthetic
DIEEILKKVEDDAREVIKEMRKSNEDNKRKNKKVIEEIERTLKKIEDDARRVIDEIEKKL

SEQ ID NO: 20702 - protein, 59 aa, Artificial Sequence
  Synthetic
RELVKKLDDELKELIKKIRTDNKRSSERNDELVKEIRKRIEKLVREAKELLKRIREDID

SEQ ID NO: 20703 - protein, 60 aa, Artificial Sequence
  Synthetic
SIEETLDELRKKIEEVIRRMKKSNDDNEKENREVIDRIRRTNEEIRKRAERVIEDARRKL

SEQ ID NO: 20704 - protein, 59 aa, Artificial Sequence
  Synthetic
KERVDKLIREVEDLIRRIEEENKKSSEENKRLVRRIEKDNEDSIRELEKLIEDIRRTID

SEQ ID NO: 20705 - protein, 60 aa, Artificial Sequence
  Synthetic
SLEELLEKVKREIDKVLERIERIVRKNAKENERVIREDERLLRELVKEIKEVEDRIRKRG

SEQ ID NO: 20706 - protein, 58 aa, Artificial Sequence
  Synthetic
DLMRKLLEEVKELIKRLEEEIEKASREDRRLVEEAKEKSKELAKRIKEELKRIEDEVR

SEQ ID NO: 20707 - protein, 60 aa, Artificial Sequence
  Synthetic
DEVDDIIRKLKELIKELREKSKRISEENKRLVRRLEELSRRIIKEIKDLLEELKDRARKD

SEQ ID NO: 20708 - protein, 59 aa, Artificial Sequence
  Synthetic
EEVKDKLRRIKEEADKAIKDNEDLLRRNERENREAVKRNEELLKEVRREVEEVIRRTRK

SEQ ID NO: 20709 - protein, 60 aa, Artificial Sequence
  Synthetic
SEVEEVIKRIKKLNKETEDAVREVIKRIEDSNEKLLRDVEELIKKIEKALRDLEDKARRV

SEQ ID NO: 20710 - protein, 59 aa, Artificial Sequence
  Synthetic
REVEELLRRVKRHTEEVVRRVERELRRIAEHVKEVEKTVRELVRRIREKIREVVERVRK

SEQ ID NO: 20711 - protein, 60 aa, Artificial Sequence
  Synthetic
DEARELVKELEDLIREITKTVRRLLEESEELIKRIDDAVDDLRRRDEDLNREIKEEIEKR

SEQ ID NO: 20712 - protein, 56 aa, Artificial Sequence
  Synthetic
ERILRELEERVKELEKEAREILKRSEDETDKLREKAERILEDLERKNRRTMDEARR

SEQ ID NO: 20713 - protein, 60 aa, Artificial Sequence
  Synthetic
SEVEELVERVKRLIDEIRKRVTDSVEESKRLIKEIKEEVDRLAEEDKRLNERIKETIRRR

SEQ ID NO: 20714 - protein, 56 aa, Artificial Sequence
  Synthetic
ERIVKKLEEEIRKIIKEIRELNKRSEDETKKIVDEARKILEDLRRENEDTKRKITE

SEQ ID NO: 20715 - protein, 60 aa, Artificial Sequence
  Synthetic
SEVEDLAKRIEDLIRRILRENERSLEESKRLIDEIRKRIEDLLRRSKELIDRIREEVRER

SEQ ID NO: 20716 - protein, 56 aa, Artificial Sequence
  Synthetic
KRILDELRKAVKKLEDDSRRLNRESEERTKKLKKELDELLKKSKDETKKLVEDLRT

SEQ ID NO: 20717 - protein, 57 aa, Artificial Sequence
  Synthetic
SEVEKLLRELEDVIRRLREDVKRIVEEDERLNKRLNDELRRLSEKNDRLNDRIRREV

SEQ ID NO: 20718 - protein, 56 aa, Artificial Sequence
  Synthetic
KEKVKRLRELVKKVIEDMERILRRLEKANRESAERAKDVLRRNHKKDEDSKRELER

SEQ ID NO: 20719 - protein, 57 aa, Artificial Sequence
  Synthetic
DRVREIVERVERVIRDILRTVEKLSEENKDLNRRLTEKIRDLERRDRELNKRLRDEV

SEQ ID NO: 20720 - protein, 56 aa, Artificial Sequence
  Synthetic
KEIVEDLRRKVEKVKRDAEKLLEDNHRRDRRNLREIEKIVEELKRRNEKTLRDLTK

SEQ ID NO: 20721 - protein, 57 aa, Artificial Sequence
  Synthetic
SEVEKLEEEVKEVIERLLRTVRDLSRRNEELNKRLTEDNERILKEDEDLNEELERRV

SEQ ID NO: 20722 - protein, 56 aa, Artificial Sequence
  Synthetic
KDVLRKLKKEAEDAIKEAEDILRENHEKDKKNKEDSEKLLRDLERRNEETLRRLRK

SEQ ID NO: 20723 - protein, 59 aa, Artificial Sequence
  Synthetic
RIEEILETLREELRTVLKKSKEILDELRKENKESIDRSKEILDRLRDEIRRILREIREK

SEQ ID NO: 20724 - protein, 59 aa, Artificial Sequence
  Synthetic
DEELKRAADKVKKLIKELDEENKKARDDDKRLNKKLNKDNDDLRREVEELLKRLRDEAE

SEQ ID NO: 20725 - protein, 60 aa, Artificial Sequence
  Synthetic
RIEDLVRDNKRKNDENTKRHERIVERLEEELRELVKRHEEDVRRLRKELEDLKRDAERKG

SEQ ID NO: 20726 - protein, 59 aa, Artificial Sequence
  Synthetic
DKKVEDLDRDNERLNRELTRHLEDLVRRVKELLRRMEEHLRELAERVKKLLDELRKEAT

SEQ ID NO: 20727 - protein, 60 aa, Artificial Sequence
  Synthetic
SDVEELAERVRRLSEEHAELVKRIVETSKRLNDDLRRMVKEIADRVRRLLEDIERKVRED

SEQ ID NO: 20728 - protein, 59 aa, Artificial Sequence
  Synthetic
EDVRKIIEDLRRHLEENRERVERIIRELRRLTEKTKKELEDIARELEKLVDELREEVRR

SEQ ID NO: 20729 - protein, 60 aa, Artificial Sequence
  Synthetic
SEVEKAEEDIRRLLKEVKDMDKKIVDDDERLNRELERTVRELAKEIEKLIRDLEERVRKE

SEQ ID NO: 20730 - protein, 59 aa, Artificial Sequence
  Synthetic
KDVKKIIKELEEELEKIAKESEESIKRLRKENRDSEERLRKILEKLKKDLEDVKRELER

SEQ ID NO: 20731 - protein, 60 aa, Artificial Sequence
  Synthetic
SDVEDVVRKIRELIRENLKRSKEIADENRRLNTENRERSKTLEEEVRRLLEEVKERAERL

SEQ ID NO: 20732 - protein, 59 aa, Artificial Sequence
  Synthetic
EEVRRILEKLRDDLRKLNETNRRIIKELRERNEKSNRDNRKILEELKDRLKKLEDELRR

SEQ ID NO: 20733 - protein, 56 aa, Artificial Sequence
  Synthetic
DEVDEVDKRSKETLKKIEDDARRVLEEYERTLEKIKRDVDRVLKESEETVRKLRAD

SEQ ID NO: 20734 - protein, 60 aa, Artificial Sequence
  Synthetic
EKELEDLVRELEEINKRLEEELRKLVEELRRHLEELRDELRKLVEELRKINEELEDRLTK

SEQ ID NO: 20735 - protein, 59 aa, Artificial Sequence
  Synthetic
SEMEDLKRVSDEVKKELEDLNRKSAKVSKEVEEEAKRLNRESREVVRRLKEELEKLERD

SEQ ID NO: 20736 - protein, 62 aa, Artificial Sequence
  Synthetic
KEVADELKKILDTHRKVDKEAKDRSEKLVRDHREVDKDVKRESDEILKRAKDTLDEIRERLR

SEQ ID NO: 20737 - protein, 60 aa, Artificial Sequence
  Synthetic
SELEKILKEIEEELKRVKERLERLHREHERLLRDVTRKLRKLLRDHREVLERVREELRRR

SEQ ID NO: 20738 - protein, 56 aa, Artificial Sequence
  Synthetic
REDLERTLRRIKEEVRKVERKAKEVLRETREKLKRLLERAREVLDENKKRLDDVAT

SEQ ID NO: 20739 - protein, 60 aa, Artificial Sequence
  Synthetic
SLEDIRRRLRELVRRLEEELRRSHEELERLVRDLERRLRESLRKLEELVDRLKKEIEKRG

SEQ ID NO: 20740 - protein, 59 aa, Artificial Sequence
  Synthetic
DDTARRLLEEAKKELDRIKEENERALRKIKDVIRKIDEESKRLNKEVADLVKKIEDRIR

SEQ ID NO: 20741 - protein, 58 aa, Artificial Sequence
  Synthetic
DLEDIVREIEKLLRDLERKAREIHERDERLARDLERKHRDIIREIERLLDELRERVER

SEQ ID NO: 20742 - protein, 59 aa, Artificial Sequence
  Synthetic
RKKVEEELERVRRIIKELERRLRELHKENKKLLDEILEESKRLAEEVRKTIEDIKRKIK

SEQ ID NO: 20743 - protein, 60 aa, Artificial Sequence
  Synthetic
SEVEDLLRRDRELNREHKRLLEEASKKNKEELERVLEKVKELLERVKKRLDEAKEALERG

SEQ ID NO: 20744 - protein, 59 aa, Artificial Sequence
  Synthetic
ERLERVLRESRKLNKESHETLKELIDRNRKLNKELEEAVKKIEEEIKKLLKELKEEKDR

SEQ ID NO: 20745 - protein, 60 aa, Artificial Sequence
  Synthetic
SEVEKLLREDRELNKRHVEKVRELSERNKELLERHEEKLKKVAKEIEDRLRRLEEMLRRG

SEQ ID NO: 20746 - protein, 59 aa, Artificial Sequence
  Synthetic
DRLKRVEEESEELNKRSHETLRRLVEENKKRNKELHERVERIKRRLEKLLRELEEEIRK

SEQ ID NO: 20747 - protein, 60 aa, Artificial Sequence
  Synthetic
SEVEELLDEDRKLNEELTKSAKRLTDENKKLLEDMKRKAEELKKRVDELLKEVTDVLRRG

SEQ ID NO: 20748 - protein, 59 aa, Artificial Sequence
  Synthetic
DRLERVLRESRKLNEDSKKRLEELIKENKDDNDRLREDLERIVRELEKRLDKLRKDTET

SEQ ID NO: 20749 - protein, 61 aa, Artificial Sequence
  Synthetic
KELEDLLRRIKRLIDENRRLSKEVLEEVRKLSEKHKKEVEDILKEIKELIEEALRRIERDG

SEQ ID NO: 20750 - protein, 60 aa, Artificial Sequence
  Synthetic
KERLDRILKTLRELLRKLREDNERIRREIREIVKRNSDELARIEEELRKLLDDLAKKAEE

SEQ ID NO: 20751 - protein, 61 aa, Artificial Sequence
  Synthetic
KELEDVLKEVEELSRRHKRRAERVSEENRKLLRRLKEEARKILEDIRRLLKKLEERVRRDG

SEQ ID NO: 20752 - protein, 60 aa, Artificial Sequence
  Synthetic
RERLKRILDEIRRIVEKNKRDLERLLRENEELNKRLREELRRILEEIEELLRELEERLRK

SEQ ID NO: 20753 - protein, 59 aa, Artificial Sequence
  Synthetic
SEAEEALKELKETSDRHKEDLDRLHEEDRRTNEEVEKELRKLVDEAKKKLDRVREIVEE

SEQ ID NO: 20754 - protein, 56 aa, Artificial Sequence
  Synthetic
EELLRRLEEIVRDNKRRVEEILERNRRLNEESEKKVRDIIKKLRDDLERLARELEK

SEQ ID NO: 20755 - protein, 59 aa, Artificial Sequence
  Synthetic
SEAEEALKELKRTSDEHRKRLEDLHRRDKKLNDDSKRRLDELLKRDEDTNRTVLDIARQ

SEQ ID NO: 20756 - protein, 56 aa, Artificial Sequence
  Synthetic
EELLRTLEKIVEDNAREVTEIIKKNRKLNDDSRREHERINDESRRLNEETEKRLRD

SEQ ID NO: 20757 - protein, 57 aa, Artificial Sequence
  Synthetic
DELEEILRRVDELIKTIEEELKKIEKRVKELLETHRELNKRLLDDHRRLAEEVKKAN

SEQ ID NO: 20758 - protein, 60 aa, Artificial Sequence
  Synthetic
RDRVEDVLRKIAEKIKRLEDRIKEVLDKLRKLAKELEDESRKVLDDSNKLIERVKRELKR

SEQ ID NO: 20759 - protein, 60 aa, Artificial Sequence
  Synthetic
DTERVVTEIKKTNDELKRRHEKVVEDDRRLLEELRRRHERVVREVERLLRELKERVDRRA

SEQ ID NO: 20760 - protein, 59 aa, Artificial Sequence
  Synthetic
REVLKKLLDDNRKIIEDLTRKNEKLHEDSKRIIEKIDDENREILRRVEEIVRRIEEELN

SEQ ID NO: 20761 - protein, 55 aa, Artificial Sequence
  Synthetic
SAEDVKRRIKESADRIRKRLREALERAKKLHTDNEEENKRVNDEIKKRVEEIRRR

SEQ ID NO: 20762 - protein, 59 aa, Artificial Sequence
  Synthetic
EKLLRELERDVRRLEREITEVVKRLEDEHKRASERNKRLLEEIKDRVRKLIEEAEERRK

SEQ ID NO: 20763 - protein, 60 aa, Artificial Sequence
  Synthetic
EEVERVRRTIDELSKENEKALKEVEERIKKLSDENEKAVRKAEEDNERLNRTAERLKRSN

SEQ ID NO: 20764 - protein, 56 aa, Artificial Sequence
  Synthetic
EKVLRDIRKKIKENHEKNERVIREIERLLKENEERNEEVIRRIKESNRKTEKDLTD

SEQ ID NO: 20765 - protein, 60 aa, Artificial Sequence
  Synthetic
SEVEEVERRIDRLSKENRRVLEEAKRRIKKLSDENKRMLEEARKRNEKLNREVKKLKKSN

SEQ ID NO: 20766 - protein, 56 aa, Artificial Sequence
  Synthetic
EKVLRDIREKAKRNHDANEKVIREIRDILRRNNEENKRVIEEIDKSNKDTEDELRK

SEQ ID NO: 20767 - protein, 59 aa, Artificial Sequence
  Synthetic
REVEEVKKEIKKLSDENKEVLERARKRIEDLSRENEDVLRRLKERNEDLNRRVRELKER

SEQ ID NO: 20768 - protein, 56 aa, Artificial Sequence
  Synthetic
EEVLRDIRRELKENHDENRKVIEDVRRIAEENHRRNKRVIDEIRRSNKETVDELRK

SEQ ID NO: 20769 - protein, 59 aa, Artificial Sequence
  Synthetic
RAEELRKEIEEIIKKNKKENEDVLREDRRRLKELKEEIEKVVREDRRTLEELEERLRRS

SEQ ID NO: 20770 - protein, 59 aa, Artificial Sequence
  Synthetic
EEVLKEIRERVEKLSEKNKRALEKWKRDSERLSREVERELEEWKKRSKRLAEEVEEATR

SEQ ID NO: 20771 - protein, 61 aa, Artificial Sequence
  Synthetic
DLEELEREVEKKLKELEDRVRKVIEESKTELKKLEEELRENSREVRDILRRLEEDVRRKVK

SEQ ID NO: 20772 - protein, 59 aa, Artificial Sequence
  Synthetic
KRLLEELRRRLDRVRKEVERLIKEHRETTDELRKRVEKLSEDHRREVEKLAKTVKDELK

SEQ ID NO: 20773 - protein, 61 aa, Artificial Sequence
  Synthetic
SRAEKIREDIRRLRKENEDRIKEIEDEFRKLLEEHERKNKEIEERVRRLVKRIEDEIRRKN

SEQ ID NO: 20774 - protein, 55 aa, Artificial Sequence
  Synthetic
DELAKRVREVSEDVNRRLDKIMKDLRRVIKELDEESKRLLEEIKRRMEEILEELR

SEQ ID NO: 20775 - protein, 60 aa, Artificial Sequence
  Synthetic
SEEEKLAKDNERLVREHEEESKKLLKTIRDLSEEHKRDLKRAMEENKEKVDRLRDMLKRG

SEQ ID NO: 20776 - protein, 55 aa, Artificial Sequence
  Synthetic
EEIATKSEELHKELEETNERIAREVEKLEKENDEILEEIADRSRRLHEDLDRERK

SEQ ID NO: 20777 - protein, 61 aa, Artificial Sequence
  Synthetic
DELEEVLRTIEKLVEDHNRELERVLRRVKELADRHREESERVAREIKKLVDDARRLVEERG

SEQ ID NO: 20778 - protein, 58 aa, Artificial Sequence
  Synthetic
DEVRRIRERVKELLDRNRERLERIEREIDRLLEDLKRKNEKIEREVRRLLAKLKEEAR

SEQ ID NO: 20779 - protein, 61 aa, Artificial Sequence
  Synthetic
SELEKIVEENRRLVKEHNERLKRILDELRELAKRHEDRSRKAMKENEELVRTVLELMKRDG

SEQ ID NO: 20780 - protein, 58 aa, Artificial Sequence
  Synthetic
EKVRKIREESKRLHETNRRRVEKIEEEIRRLLKRLEDTNRDIERRSKKLHEDLEREAR

SEQ ID NO: 20781 - protein, 61 aa, Artificial Sequence
  Synthetic
SELDKVMRDNDRLVKEHAEVSKELLDRLKKLAEDHKKRSEEVLRENKRLVDEVRRLAKERG

SEQ ID NO: 20782 - protein, 58 aa, Artificial Sequence
  Synthetic
EKVRKIARRSDDLHRELKERNDRIKREIERLLEELKRTNDKIVEDSKRLHDDLEREAR

SEQ ID NO: 20783 - protein, 61 aa, Artificial Sequence
  Synthetic
DELEEIRKTIEELSKENKKKLEEVMKEVEELARRHEKRSRDLLRRLKKLVDELRDRVEKTG

SEQ ID NO: 20784 - protein, 58 aa, Artificial Sequence
  Synthetic
ERVRKISEDVRKLLEDNKRIAERIDERIKELLKRLEDTNRRIEEEIDRLLEELKREAD

SEQ ID NO: 20785 - protein, 57 aa, Artificial Sequence
  Synthetic
DELDDLLRRAKETSDRHKETLKKILDEMREEVKRHNRDLERILEEVKRLIDEVRKAN

SEQ ID NO: 20786 - protein, 59 aa, Artificial Sequence
  Synthetic
REDVKRIKETMKKLLDENRTEVEKIKREADRLLEENRRLVKEIEDTIRELLKRLEDERR

SEQ ID NO: 20787 - protein, 60 aa, Artificial Sequence
  Synthetic
SKKETIKKDAEEALKRSKKKLDELKERLRKVMRETEERLRRLEKELRDLAREIREKIKKR

SEQ ID NO: 20788 - protein, 55 aa, Artificial Sequence
  Synthetic
DRLRKEVEDLNRETDKVIEKLREDIDRLDKESEEVIRRLKDEIRRLFEEIDRRLR

SEQ ID NO: 20789 - protein, 61 aa, Artificial Sequence
  Synthetic
SELEEVKERVDRLIREVEKMNRDSERRVKKLIDDVRRENRRTEEDVRRLVKRAEEIVRKDG

SEQ ID NO: 20790 - protein, 59 aa, Artificial Sequence
  Synthetic
KEKVDRLKKEADDLLRKIKEDNERITEKVKELLERLRKNNEEIKREADRLLEELRRRVK

SEQ ID NO: 20791 - protein, 57 aa, Artificial Sequence
  Synthetic
SELEELDKRITELSEEIKRRLEELLRRNEDLSRRIEEAIRRILKRNEDVIRDIKRKN

SEQ ID NO: 20792 - protein, 58 aa, Artificial Sequence
  Synthetic
KKVRDIEEKIERLNRELEKIAKEIRERTERLNKRLEELIREVDERNRDLLRRLEEEVK

SEQ ID NO: 20793 - protein, 60 aa, Artificial Sequence
  Synthetic
KDEEDARRKLEELRELARRDIERNKRELERLRREIEKDEEDNEEVIKRLRERVEELRRRQ

SEQ ID NO: 20794 - protein, 58 aa, Artificial Sequence
  Synthetic
ESLKRLKEELEKLLRDYKKKLDDSDKELRDLLAEYDDRLTRSDKRLRDLLKEAREKSK

SEQ ID NO: 20795 - protein, 61 aa, Artificial Sequence
  Synthetic
DTAERAEEELERSDRELKETLRRAEEELKRSHKELERIVERARRELRRLAEELEEVIRRKK

SEQ ID NO: 20796 - protein, 60 aa, Artificial Sequence
  Synthetic
EETLRRKLERLLERHKKVVDDVERTLRDLLERHKEVVERVREKLTDLLRKLKKVIDDVRR

SEQ ID NO: 20797 - protein, 58 aa, Artificial Sequence
  Synthetic
SELETIKKRAEELSKESEDILRDIERKLRKLSEESKDILRRLKEELEKLHKELVDKKG

SEQ ID NO: 20798 - protein, 59 aa, Artificial Sequence
  Synthetic
EELEKELEEVLTEYREVVERLADELRRLLKKYEDDVRRLEEHARRDLEKLDRDIKEEER

SEQ ID NO: 20799 - protein, 57 aa, Artificial Sequence
  Synthetic
SKLDDLLRKIERLVTESLRRLRKTNEDAKRLLERSVRELEKSNKEIRDLVKEIKERN

SEQ ID NO: 20800 - protein, 59 aa, Artificial Sequence
  Synthetic
KKKVDELRERLRELLKRHRDAVEKNRRDLEKLREDHRRLVEKNKRDLDKLKEELDRTKK

SEQ ID NO: 20801 - protein, 57 aa, Artificial Sequence
  Synthetic
SELDELLKRLEELVREIIKRLRDSNRRAKEVVDRSVKRLEESNRTLRELIKDVKDKN

SEQ ID NO: 20802 - protein, 59 aa, Artificial Sequence
  Synthetic
EEKLRRIKRRIDELEKTLRKIIKDNTDNLRKLTEDHRRLVEKNKRDLEKLEEELKRRRK

SEQ ID NO: 20803 - protein, 57 aa, Artificial Sequence
  Synthetic
SKLDELLERIREEVKRSVKRLEDSNKEIKRLMEESADELRRSNKELRDAVRDLKRKN

SEQ ID NO: 20804 - protein, 59 aa, Artificial Sequence
  Synthetic
EEKVRRLDKVLEDLRREHEKIVRDNEENLRRLLERHKRLVDKNKEDAERLLRELRETVR

SEQ ID NO: 20805 - protein, 59 aa, Artificial Sequence
  Synthetic
SELEELLKRLRDLIERIVKRLRELSKESEDLIRRIERTIEKLSEDSERAIEEILRRIDK

SEQ ID NO: 20806 - protein, 59 aa, Artificial Sequence
  Synthetic
EDRLREVEEEAKKLEKRIEDMIRKHKETNKRLKEELDKLVKEHKDRNRKLLEELKKRAT

SEQ ID NO: 20807 - protein, 61 aa, Artificial Sequence
  Synthetic
SEIEEVIERLDDTMRRIEERIRDTNRRLKKVIDDSKRRNERTNREVRKTIEKLTRELERDG

SEQ ID NO: 20808 - protein, 54 aa, Artificial Sequence
  Synthetic
EVKRRLEELRRRIEKMLEEHRESLRRLEEELEESHKRHKDTLRKLSKELEEKLK

SEQ ID NO: 20809 - protein, 61 aa, Artificial Sequence
  Synthetic
DEVDEVLKRVDELLKRHEETNKRLEEEIRKIHEENKRTIEELLKEVRKRAEEVERLVRRDG

SEQ ID NO: 20810 - protein, 59 aa, Artificial Sequence
  Synthetic
EEELKRVKERLKEIRKRAKESHDRLRETVKELIDRNRKLLRELEEELRKIEEKIREDAR

SEQ ID NO: 20811 - protein, 56 aa, Artificial Sequence
  Synthetic
SEEDELRETAKRIREEVKKSIEENRELAKRITDEVRELLERNKRRIEEVKERLERS

SEQ ID NO: 20812 - protein, 56 aa, Artificial Sequence
  Synthetic
EDDLRRRLEELLKRLRDESRKVNEDLKRLVDELRRLSKEMNEELKELEDRVREKER

SEQ ID NO: 20813 - protein, 57 aa, Artificial Sequence
  Synthetic
SEEDEVREDNKRIVEEVERLLKEIEDNNREITREAEELLKRLEEEARRLMEEIRRSK

SEQ ID NO: 20814 - protein, 60 aa, Artificial Sequence
  Synthetic
DEELLRRLRDMNRRSKERADRLIEEAKKENDRSSKRVRDLIREVDEILKEVKKRVEDVTT

SEQ ID NO: 20815 - protein, 56 aa, Artificial Sequence
  Synthetic
SEAEKVVEELKKLLREVEKKIRDHTEDVKRILEELERRLRKHSEEVRRTAKELKDK

SEQ ID NO: 20816 - protein, 59 aa, Artificial Sequence
  Synthetic
EKVLRELEKILEDIKRTLDKLLRENRETLKRIEDRLRELLEENRKLLEKIERELRERSR

SEQ ID NO: 20817 - protein, 56 aa, Artificial Sequence
  Synthetic
SEVEDVIRKLRRKAEDLTRRLKEHTDDVKRLMEELSKDIKDHTREVKRIAREAKEK

SEQ ID NO: 20818 - protein, 59 aa, Artificial Sequence
  Synthetic
EEVLRDLERVLRDIERRLRELLRRNEEVLDRIRRTLEDLHRKNEEVLREIERDLRERER

SEQ ID NO: 20819 - protein, 56 aa, Artificial Sequence
  Synthetic
SEVEDVIRRLKKKLRELVERIREHTKRVRDLARKLEEEIKRHTEEVKRIADEAKKR

SEQ ID NO: 20820 - protein, 59 aa, Artificial Sequence
  Synthetic
DELLKRLEDVLRKIRKDLEELLRKNNRDLEEIKKRLEELHRRNRETLERIRKDLEEDER

SEQ ID NO: 20821 - protein, 61 aa, Artificial Sequence
  Synthetic
SEIEEVLERIKKLLDELRKESRKLLEDHKKRAEELEEKARRLSERHKELLDRLKEVVDRDG

SEQ ID NO: 20822 - protein, 59 aa, Artificial Sequence
  Synthetic
EEMLKRAEDLLRRIDEELKRSHEELKELSDRIRERLERLLRTLEELSKEIDKRADDLRK

SEQ ID NO: 20823 - protein, 61 aa, Artificial Sequence
  Synthetic
SEIERVLEELRKLLEELRRESKKLLDELRKLLEDARRESEKLLRELKDLLRRAEELVKRDG

SEQ ID NO: 20824 - protein, 59 aa, Artificial Sequence
  Synthetic
EKVLDELRRELDKIREDLKKSHRELEELIKKIRTELDKSNRKLEELLKRIEERLDEMRR

SEQ ID NO: 20825 - protein, 61 aa, Artificial Sequence
  Synthetic
SEAEKVLEELKKLLRDLEETSKRVLREIRELLKEAREKSKRLLDRLRKLARDLKELVRRDG

SEQ ID NO: 20826 - protein, 59 aa, Artificial Sequence
  Synthetic
KEVLDRIKRLLEEIERELERSNKELEDLLRKIEEDLERSHRELEKLIREILKELEDARK

SEQ ID NO: 20827 - protein, 57 aa, Artificial Sequence
  Synthetic
DAEERLRKLLDDIRRELKRLTEETRKSLEKIKRDNDELEKKLRKLNEDSDRRLKEAN

SEQ ID NO: 20828 - protein, 59 aa, Artificial Sequence
  Synthetic
EKTIEDLLRELEKALRDLEKEVREINKELKRVLDEIAKTHEDLLKKHEELLRRVEERAR

SEQ ID NO: 20829 - protein, 57 aa, Artificial Sequence
  Synthetic
DLERELEKLLKDIKEELDKLIRTNEETLKEIEREVRKLLKRNKELLDRIREEVRKTG

SEQ ID NO: 20830 - protein, 59 aa, Artificial Sequence
  Synthetic
KEVVDRILKEARELLERIREENRRTLEDLRRILEDLRRRNKRHLDELRRVLKELRDKRK

SEQ ID NO: 20831 - protein, 56 aa, Artificial Sequence
  Synthetic
SLEERLEKLLKEIRETVKKNIEENRDLLRRVEEDLRRLTERNKRLLEKIRDALRKA

SEQ ID NO: 20832 - protein, 59 aa, Artificial Sequence
  Synthetic
EEVARRLMDDLRRLLEKIDRLSREHLERVRKILEDLRRLSEKHLKELEDLLREAEEEAR

SEQ ID NO: 20833 - protein, 56 aa, Artificial Sequence
  Synthetic
SLEERLEELLDEIRKMLKRLEDENRRLLKEIEKRVRENTRTNRELLKRIEDRIRKA

SEQ ID NO: 20834 - protein, 59 aa, Artificial Sequence
  Synthetic
EEVVRTLLRELEKILAEAEDLSRRHLERLRDILREAEDLSRKHLEELKKVLEELERRAK

SEQ ID NO: 20835 - protein, 57 aa, Artificial Sequence
  Synthetic
SDVERLLRELEDLLRRLEERIRELNKRHEELVRRLKEEVKRLSREHNEVVADVARKN

SEQ ID NO: 20836 - protein, 59 aa, Artificial Sequence
  Synthetic
KELRDRLRDVVRRLEDELRRLDDELRKNSEEVKKVLDDLRRHLEENSKRAEDTLRELRR

SEQ ID NO: 20837 - protein, 57 aa, Artificial Sequence
  Synthetic
SEVEKLLRELEKALEDLRRTNEKLDREHDAVVKEVKKIAKDLSREHRDVVEDVKRKN

SEQ ID NO: 20838 - protein, 59 aa, Artificial Sequence
  Synthetic
EELRDELRRVVEDVEKKLDDLRKRNEENSRKVKEVLEKLTRELDKNREEVERTLEELRR

SEQ ID NO: 20839 - protein, 57 aa, Artificial Sequence
  Synthetic
SEIEKLLEEIKESLERLKKTAEDLLEELRRLLEELERRVKELSDEHRRLVKELKDRN

SEQ ID NO: 20840 - protein, 59 aa, Artificial Sequence
  Synthetic
EELKKRVEDVLREIKRAHDDLRRRLEKILRDIEKTIEDLERHMKENHDDAERVIEELKR

SEQ ID NO: 20841 - protein, 60 aa, Artificial Sequence
  Synthetic
SEEEALERVLRELRRSLEELEEELRRAIRKLEDNLRRLREALETILKKLDDLLDDLRRRK

SEQ ID NO: 20842 - protein, 55 aa, Artificial Sequence
  Synthetic
DKLKKEADDLDRRSRKTIKEVLDEIKELDDRSNERIEEVIREIEDEARRLAREVD

SEQ ID NO: 20843 - protein, 60 aa, Artificial Sequence
  Synthetic
SEEERLREIRERLKKSLEDLKRELEEILRELERSLDKLRRDLERLLEDLRRLLDELRRRK

SEQ ID NO: 20844 - protein, 55 aa, Artificial Sequence
  Synthetic
EELEKKARELNERSKEKIKRLLEKLRKLDKESKDEIKRVLDKLRELAKRIKEEMD

SEQ ID NO: 20845 - protein, 60 aa, Artificial Sequence
  Synthetic
SEEERLRRVIEEYKRVLDELSERLKRLLDELRRSLKKLEEDLKRLLDELKRTLDELIRRV

SEQ ID NO: 20846 - protein, 55 aa, Artificial Sequence
  Synthetic
EELEKKLREALDTVRRLYEALIKKARELDKRSKDEIKRVVDKLKKLVRDIEERVR

SEQ ID NO: 20847 - protein, 60 aa, Artificial Sequence
  Synthetic
DDIEDVLRRIEKLIRDLRDHSRKLVEEIEKLIEDHTRHSRKLERDIKELLKRLRELRRRG

SEQ ID NO: 20848 - protein, 59 aa, Artificial Sequence
  Synthetic
EEVKKRLDEARRKAEKVVKESRDTLRELKDKVRENLDRSRKELKKLEEELEEVLREARE

SEQ ID NO: 20849 - protein, 60 aa, Artificial Sequence
  Synthetic
SDVERVAKTIEDLIREHTEHVKRSAERVERLIKEHTDHVRRSLTRIEDLLRRLEEMRRRG

SEQ ID NO: 20850 - protein, 59 aa, Artificial Sequence
  Synthetic
EDVERKARELERKVRENVRKVRDDHRKLEEKFRDNLRKVKREHEEAERKMRDLLREARR

SEQ ID NO: 20851 - protein, 60 aa, Artificial Sequence
  Synthetic
KDVDKVEEDIERLLADLRRHNEKLHRDIERLLEELRRHNDKLRKTLEDLLKKLKELAERG

SEQ ID NO: 20852 - protein, 59 aa, Artificial Sequence
  Synthetic
EDVKRRLEDLERKARRVLEESRKDLEEAKKKVDELMKRARDSLRELTRRLEELVRRIRK

SEQ ID NO: 20853 - protein, 60 aa, Artificial Sequence
  Synthetic
SEVEEVMKEIERLIEELRRHNEELARRLEELIKDHTRHNEELHKTIEDLIKELEDLARRG

SEQ ID NO: 20854 - protein, 59 aa, Artificial Sequence
  Synthetic
EEVEKRLRELKEKLDKVLDELRETLKRLEEKARENLKRSRDDLETIKRKLKKVMDEARR

SEQ ID NO: 20855 - protein, 59 aa, Artificial Sequence
  Synthetic
SDVERLIEELERLLDELRKKTEEIIRRIKKLIDELRRKTEEVIKRLEKLARDLTRLTER

SEQ ID NO: 20856 - protein, 59 aa, Artificial Sequence
  Synthetic
EEARRRIDEIRKKAEEVNKESRDRLRRLKEEVDKVDKDSKRRLDELREELRRLMEESKR

SEQ ID NO: 20857 - protein, 60 aa, Artificial Sequence
  Synthetic
DAARELRERLKKAIEDHRRLLERAARDVERLNKELEDILRRMAEDMKRSIEELKRVSEEG

SEQ ID NO: 20858 - protein, 56 aa, Artificial Sequence
  Synthetic
EKDLRRLEEEIRKEIRRSNETLKKLKKKTEDSLRTIKRRLEELHEEAKKVLDDLRR

SEQ ID NO: 20859 - protein, 59 aa, Artificial Sequence
  Synthetic
REDETLKRLEEENEEVNKRSEETLRKLLEDNRRLLERIEERLRELLEELRRLLEKIRKD

SEQ ID NO: 20860 - protein, 56 aa, Artificial Sequence
  Synthetic
KDELTERVKRHIEENKKLTEDVARKSEKHLRDLEELLERLRKLVEDLLRRLEEEAR

SEQ ID NO: 20861 - protein, 59 aa, Artificial Sequence
  Synthetic
SELEKVRKESERNLRSNEKLLRELDELSERNLDKLRRFVEEVRELVREMLERLDSVRRR

SEQ ID NO: 20862 - protein, 59 aa, Artificial Sequence
  Synthetic
EEVKRDVERNEKENKELLDRTRRKVEENAKRNKKLLEDIREDLKRLATELRRKLEEIRR

SEQ ID NO: 20863 - protein, 61 aa, Artificial Sequence
  Synthetic
DKEETVKDLERRYRDLLREIEKRLRELVRRNDKLLEEIKKAIEDLIRENEKKIKEIKERRG

SEQ ID NO: 20864 - protein, 55 aa, Artificial Sequence
  Synthetic
DELRRRAEEALERNKRLLEELKKENDDHLKRLKELLEELKKRNEDHLRRLDEEER

SEQ ID NO: 20865 - protein, 59 aa, Artificial Sequence
  Synthetic
KELEEIKRAVDESLKRAKELMDRHRREVEKSLEEMKRLAEDHKRRADRLLKELKRLADE

SEQ ID NO: 20866 - protein, 59 aa, Artificial Sequence
  Synthetic
DEVRRAVKELKDRHKELLDRIERESERLREEHRRLLEKIERTSEDLIRRLEKLIRDIRR

SEQ ID NO: 20867 - protein, 59 aa, Artificial Sequence
  Synthetic
DEVETVEEEVKKSLEELRDLARKHEKKVRESLKRLEESLRRSEEKVKDIIRRLEELKKR

SEQ ID NO: 20868 - protein, 59 aa, Artificial Sequence
  Synthetic
EEVKKRLEDLRKEHEDTLRDIERRSRELLKRHKDKVDEIRKAHERLIRELEEIARRIKK

SEQ ID NO: 20869 - protein, 59 aa, Artificial Sequence
  Synthetic
SEEEELKKKLEKSLDELRRSLKKSAEDVRRILEELKELMKRHKEVVEEIARELDELRKR

SEQ ID NO: 20870 - protein, 59 aa, Artificial Sequence
  Synthetic
EDVERSLRDLRRKHKELVDRIDEEHKRLEKELRDIIEEIERRSRKLLKELEDIIRETRR

SEQ ID NO: 20871 - protein, 59 aa, Artificial Sequence
  Synthetic
SLEEELKRVMKEVRDLAKEHSDRSRDVMREIRELSEENERRLRRVLEEAKRLADDLRRD

SEQ ID NO: 20872 - protein, 59 aa, Artificial Sequence
  Synthetic
ERLKDILRRIREDIERLLDELRKLNEKIKRDVDRLLKENKETLDDIERRIRKLLDDERR

SEQ ID NO: 20873 - protein, 60 aa, Artificial Sequence
  Synthetic
SVEELITRVERENERVARRDEELLRENEKRNRDVTREDRDLLKKLKEEVEEVLKRIREEG

SEQ ID NO: 20874 - protein, 59 aa, Artificial Sequence
  Synthetic
EETVKELVKHNEDLLRKWEKKSEDLSRKNEEALERWRRKSKKLAEELKKTLEDIRREVT

SEQ ID NO: 20875 - protein, 60 aa, Artificial Sequence
  Synthetic
DVEDKIRRLKERIKEVTERDRKLLEELKREAEEVLRRDKKSLEEVEREIEEILKDAERKG

SEQ ID NO: 20876 - protein, 55 aa, Artificial Sequence
  Synthetic
DELIREVEKVLEDWKRKVDELNRRLKKVLKEWEDTVRKLNEELKDVLDKLREELD

SEQ ID NO: 20877 - protein, 56 aa, Artificial Sequence
  Synthetic
DMEDKLRKIKEAIKKVLDEIRKLLEDIRRRLKRVREEIEEIHKRNEEENDRVKKEL

SEQ ID NO: 20878 - protein, 55 aa, Artificial Sequence
  Synthetic
DELIKKIRELLEELKDELRKLLEEAEEVLERLKRSVEELSRRNKKLVEDLDRKTR

SEQ ID NO: 20879 - protein, 56 aa, Artificial Sequence
  Synthetic
SVEEKARDILEKLKRVVEKIKEIADRNRRENEDADREIKRLIEENKKRNEDLLRRL

SEQ ID NO: 20880 - protein, 55 aa, Artificial Sequence
  Synthetic
DELIKRIKEIIETLEKEVEDLSRENKKKVEEILDKVRKVSTRNREKLDELDKKVR

SEQ ID NO: 20881 - protein, 61 aa, Artificial Sequence
  Synthetic
SDEEILRELEKRLEENVRRVEKRHEELEREVRDNLRRAEEKHRELEERVKRVIEEVIRTKG

SEQ ID NO: 20882 - protein, 59 aa, Artificial Sequence
  Synthetic
EEMVRKLVEDVDRLITDHTRSLEDVDRKVKDVIRRHTDSLRKVEEDVKRIIEELRKKAE

SEQ ID NO: 20883 - protein, 61 aa, Artificial Sequence
  Synthetic
DDEEILKKLREDVERVIKKIEDSLRELRKRLKDNVDRAEELHRRLEERAKKLIDEIIKKRG

SEQ ID NO: 20884 - protein, 59 aa, Artificial Sequence
  Synthetic
REFVRRLAERVKKLLKELEDRLRELEERVKEVITRHTRSLEEIVRRVERVLEEMERAAK

SEQ ID NO: 20885 - protein, 60 aa, Artificial Sequence
  Synthetic
SETEEAKKEIDEIIKRIEEETKRLRETYKRIIEEIERVSKRLEDEYRKLIEELERAKREG

SEQ ID NO: 20886 - protein, 55 aa, Artificial Sequence
  Synthetic
EELDKLRRRLEEILKRHEESNKKLSEDLERILEEHRRENERLHRELREILERLRR

SEQ ID NO: 20887 - protein, 56 aa, Artificial Sequence
  Synthetic
SIEDILRELEKELRESSKRSREILERLREELRDSSRRSEEILERLKRKVKRVKEEI

SEQ ID NO: 20888 - protein, 59 aa, Artificial Sequence
  Synthetic
DKRVREVAERLRRLNERYNREVKRLEKEARRLNEEYNRLVERLAREVEKLIRDLKEEAR

SEQ ID NO: 20889 - protein, 59 aa, Artificial Sequence
  Synthetic
SLEDLVREIRKRLDDMEREVKKVDDESRKRLDEARKRVEKINRESEKRLKEVADELSEL

SEQ ID NO: 20890 - protein, 59 aa, Artificial Sequence
  Synthetic
EKLARDLRREVRKLEKRLEELLKELKETTEKILRELERLLKKLEDDTRRVLEEIKELKR

SEQ ID NO: 20891 - protein, 58 aa, Artificial Sequence
  Synthetic
DEEREVKRKYREDLDDIRRHSEEVLKRYDEAVKKLDEDLKKVVEEYERALEEIVRRAG

SEQ ID NO: 20892 - protein, 56 aa, Artificial Sequence
  Synthetic
EEMSKDLERELRRSRRENERLAKELEDALRKSEEDIRRLVEENKERLERLERELSR

SEQ ID NO: 20893 - protein, 61 aa, Artificial Sequence
  Synthetic
SEAEKVEEEVKELVKRNREKHDEIRRRIEKLKEDLKRTSERSERKIKRLVEKIDDTLRKKG

SEQ ID NO: 20894 - protein, 59 aa, Artificial Sequence
  Synthetic
EDELKRMADTIRDEIRKDNERLRRTLEKAKREADEYRERDKRKLEDFEREIRRIEEETR

SEQ ID NO: 20895 - protein, 56 aa, Artificial Sequence
  Synthetic
DEREEIEKTIRELMRENDDLVRKIRREIEESLRENRRTLEKIKKEIEELTRKAKRD

SEQ ID NO: 20896 - protein, 59 aa, Artificial Sequence
  Synthetic
EETLRKRLEEVKRKSDEHKKELEERLREVRRRSERVNEELKKTLEEVRKKIRELIERDR

SEQ ID NO: 20897 - protein, 59 aa, Artificial Sequence
  Synthetic
SEEEVARRVEERVEELDRRLREIVKDLRDHNRRMKEKLEEAVERVRRRDKELDDILRET

SEQ ID NO: 20898 - protein, 55 aa, Artificial Sequence
  Synthetic
EELRKKLEDLRRKIDEKVKKVTKEHRDSAKKIRDDVRRVKEENKKANRELAEKRR

SEQ ID NO: 20899 - protein, 58 aa, Artificial Sequence
  Synthetic
SREEEVEEEYERLLEEIRRRVKEVEKEYRDLLKKIEDDVREVRKEYEKLVEDLSRKAG

SEQ ID NO: 20900 - protein, 56 aa, Artificial Sequence
  Synthetic
EDASRRLRDIARRSREELEEEVKRLRTEIEKSERELRETTKENRKIIEDVRRRLEK

SEQ ID NO: 20901 - protein, 58 aa, Artificial Sequence
  Synthetic
SEKEEVEREYRELLKEIEKRIDEVIKEYRDLLRDIRREVKRVLREYAELVKELKKTTG

SEQ ID NO: 20902 - protein, 56 aa, Artificial Sequence
  Synthetic
DEAARELRKKAEDSKRELEKLEEENRRIIKRSRERLKKIEEDNRRIIKEVLDRARK

SEQ ID NO: 20903 - protein, 59 aa, Artificial Sequence
  Synthetic
SKEELVKKARDELRRVLEELKRAVDELRKRDEDYERKSEDVVRRLRKIDKDVREVLRRG

SEQ ID NO: 20904 - protein, 55 aa, Artificial Sequence
  Synthetic
EEVEEEIRREAKRIDDELEKVEEENKRTLDRAKKHNEEVEKENRDTLREIDKERE

SEQ ID NO: 20905 - protein, 62 aa, Artificial Sequence
  Synthetic
SIEEEAKEIIDKVRKEVEDIVRRLKETNDEVRERLERILRRLEEVDEEAKRRVEELRERKRT

SEQ ID NO: 20906 - protein, 55 aa, Artificial Sequence
  Synthetic
DRLREELEKLARDVERRTRELEKHHRELMKRAKEETERLERHHDELAKRVREKLK

SEQ ID NO: 20907 - protein, 60 aa, Artificial Sequence
  Synthetic
DEIETVLDEVRRLHEDAKRRLEEMIDEVRKLNEESVRELARVVEEVERLLRTVKEEVERA

SEQ ID NO: 20908 - protein, 56 aa, Artificial Sequence
  Synthetic
AREALKESRKVVEESRESVRRVLEKNRRVVEESKRLAEELLRRVKKVVDEIRKRVE

SEQ ID NO: 20909 - protein, 60 aa, Artificial Sequence
  Synthetic
DELEEVVRRVRELSRTVKEELREVIERVRELSERVKKKLRKVLREVAELHREVMKRVRDS

SEQ ID NO: 20910 - protein, 56 aa, Artificial Sequence
  Synthetic
AEEVLREVEKVVEDSRRSAKDALKRVEDRVRESDKSVRELLEENRKVVEDIKRRVD

SEQ ID NO: 20911 - protein, 60 aa, Artificial Sequence
  Synthetic
EELERILDKVRKVIEEVRKRLRDDLRTVEKVLKETEEVLRRAAERAKRALERVEEAARRG

SEQ ID NO: 20912 - protein, 55 aa, Artificial Sequence
  Synthetic
REVLRKVRELLRTIREEVERVLRKSNELSTRIKKRIDDVLETLERLLKELDDKLR

SEQ ID NO: 20913 - protein, 60 aa, Artificial Sequence
  Synthetic
KDVEDVEREVDEVVKRSDDTVEENLRRAEDVVRDTDRIVKEMKERIDRVVERVEEVVRRG

SEQ ID NO: 20914 - protein, 55 aa, Artificial Sequence
  Synthetic
EEVLRKVTRLLREAKRRTEESHKKVNDLSRRVKERVDEVLERVKRLLEEVKRKVK

SEQ ID NO: 20915 - protein, 60 aa, Artificial Sequence
  Synthetic
DEAEKVLKESKDTVDKIRRDVERLVDESRKTVDRIRELVDKAVKDSKDSVDRLRDVMRRN

SEQ ID NO: 20916 - protein, 56 aa, Artificial Sequence
  Synthetic
EEVLRRIEKVNRDVARRVEEVFREAKEVNKKVDREVEDVIRKVKRVNEKVDEELKK

SEQ ID NO: 20917 - protein, 59 aa, Artificial Sequence
  Synthetic
SEAEEVVRRSRETVTRNVRMLEKVVRDSEETVKKIVRDVERLLEESKKSVDDLRRLKEE

SEQ ID NO: 20918 - protein, 56 aa, Artificial Sequence
  Synthetic
EKVLREVKEVNERVRETSRDIADRVREVNEDVKRKVKKVIDDIRRVNEKVKRELEK

SEQ ID NO: 20919 - protein, 60 aa, Artificial Sequence
  Synthetic
DEAREVVKRVKDLVRRLRRLSEKSLEDDKRLIEEVNKRSKDILDKVKKLVDDLRDMVRRT

SEQ ID NO: 20920 - protein, 56 aa, Artificial Sequence
  Synthetic
EEVIKEIERVVRKVLEESREVHERIRETVKEVNDRNRKVLREIREVVKKVFEDARR

SEQ ID NO: 20921 - protein, 59 aa, Artificial Sequence
  Synthetic
SDAEEVVRENRELVERIVREVEKILRDNEELVKRLVELVETSLRRNEKMVDELKKLVDR

SEQ ID NO: 20922 - protein, 56 aa, Artificial Sequence
  Synthetic
SRVIKEIRDTSKDAVRKVEEVLRRIEETVRDAERKVKEVIKRIRETSKEVLDRVRK

SEQ ID NO: 20923 - protein, 60 aa, Artificial Sequence
  Synthetic
DAAERALRRSEEVVRESVEEVKTWVDENRRSVERLREELRKDEERVRRVVERIRKLVEDG

SEQ ID NO: 20924 - protein, 56 aa, Artificial Sequence
  Synthetic
EEVLKRVRKTNDDSDKEVKRLIDEARKLNDDVRKEVEEVLERTTRILDRVRKEVEK

SEQ ID NO: 20925 - protein, 60 aa, Artificial Sequence
  Synthetic
DEAREVERRVREMVKELKRRLEEDVKESDKSVKDLERIAKEDVDRSRESVKELRDRVRRR

SEQ ID NO: 20926 - protein, 56 aa, Artificial Sequence
  Synthetic
EEAVRRVKRIIEEVRKVLEDVFRESERLNREVREKLKRMFETSKELNKRVEEALRE

SEQ ID NO: 20927 - protein, 61 aa, Artificial Sequence
  Synthetic
DSRRELEDDVRRIVETNRRLLEELERRVKKILEENRRLVEELRKENERIVRELTDRVRRDG

SEQ ID NO: 20928 - protein, 56 aa, Artificial Sequence
  Synthetic
EDVVRTVEKLIRDLEEESRRVLEEVRRLLDEVRKESEEVHKRVNEIVKRVEDEIRR

SEQ ID NO: 20929 - protein, 59 aa, Artificial Sequence
  Synthetic
SSKDEIRRRVEEVVERSDEIVKRSREHVKTVVDELDRVVKELERKVREVVKKLDKIRKD

SEQ ID NO: 20930 - protein, 56 aa, Artificial Sequence
  Synthetic
ERALREVEEISRKSEEKLRRVLKESEDIAKEAEDRLKTVLERVERIADEVLKRLTK

SEQ ID NO: 20931 - protein, 59 aa, Artificial Sequence
  Synthetic
SKVKEVEDRVREVVKESERVARESLEHVRRVVRKTEDVVRRLKEKVRKAVEDLKEIKRR

SEQ ID NO: 20932 - protein, 56 aa, Artificial Sequence
  Synthetic
EEVLKKVEEISERSRRELRRALKESDKISEESLRRLRKVLREVEEIVRRVLEELRR

SEQ ID NO: 20933 - protein, 59 aa, Artificial Sequence
  Synthetic
SKVEKLEEEIARLVERSRRLVEELKKEVTKVKEKVDEIVERSRRHVKKVVEKLRDIKRR

SEQ ID NO: 20934 - protein, 56 aa, Artificial Sequence
  Synthetic
EEVLRRVEETSDRSEKELRTVLRDVTEDIKRIAEELKKALEDSTEIIRRAEDELRT

SEQ ID NO: 20935 - protein, 61 aa, Artificial Sequence
  Synthetic
DSDRKIDDEVRKVVETSERSLRENIKRIEKVVRKLEEEVRKDLEEVRRVVKELREIVKRNK

SEQ ID NO: 20936 - protein, 56 aa, Artificial Sequence
  Synthetic
EEALRKVEEDLRRLDRRVEEVVTRSKEILDEARKSVEEVVRRSDEILRRVEEDLRR

SEQ ID NO: 20937 - protein, 60 aa, Artificial Sequence
  Synthetic
DEVEDILRKVEEIVKKSITDARRLLKEAREIVEESIKTAEELLRRNEDIVRKLSEDVKRT

SEQ ID NO: 20938 - protein, 55 aa, Artificial Sequence
  Synthetic
KRVLEKIKKVVDDSVRVNREVLKRVEEVLEESKRVNEKVEEDVRRVHEEVRKEIK

SEQ ID NO: 20939 - protein, 60 aa, Artificial Sequence
  Synthetic
DRVEKLLEDAKKIVEDSKRTAEKLLRENEKIVEKIKREADKILEDNKKIVDELAEAVKRT

SEQ ID NO: 20940 - protein, 55 aa, Artificial Sequence
  Synthetic
RRVLEEVKRVIDESRRVNKRVEEEIRKVHRDVERRLEEVLKRVRDTSEDVRRKIK

SEQ ID NO: 20941 - protein, 60 aa, Artificial Sequence
  Synthetic
SEAEKLLRDVEREVERVIEDADKLLREIEEIVKRSEDKAREILKENEKIVRELKEAVRRT

SEQ ID NO: 20942 - protein, 55 aa, Artificial Sequence
  Synthetic
EEVLRRIKKVVDDVRERLREVEKRIRDVIDRSRRVNERVLREAERTSREVERAID

SEQ ID NO: 20943 - protein, 59 aa, Artificial Sequence
  Synthetic
DEAEDVLRKVRERVKESERHVEKVLEDVRRVVKKSIDHARDVLRKVKEVIDRVRELVER

SEQ ID NO: 20944 - protein, 55 aa, Artificial Sequence
  Synthetic
ERVEREIRRVLKRSKERLEEVVKEIRELSEKSRRVLEEVKKRIREVLERVRKDVE

SEQ ID NO: 20945 - protein, 59 aa, Artificial Sequence
  Synthetic
REAEEVLKEVRKAVEDSIRHVEEVLEEVKKVVEESIRHIRDSLRDVRRVIEEVDRLVKR

SEQ ID NO: 20946 - protein, 55 aa, Artificial Sequence
  Synthetic
KRVKEEIDRVLDESKRVLEEVVTRIRKVSDDSEKEVRRVHKESKRVVEEVERTVD

SEQ ID NO: 20947 - protein, 60 aa, Artificial Sequence
  Synthetic
DEAEDVLRRVREMVERSIEHVRRVLKEVEDVVRESIKHVEDVVREVREVIREVEELVDRN

SEQ ID NO: 20948 - protein, 55 aa, Artificial Sequence
  Synthetic
KRVEEEIDKLLRESKRELDEVRKRIEDLSRESERRLREAVEEIRRLVKKVAEKVN

SEQ ID NO: 20949 - protein, 59 aa, Artificial Sequence
  Synthetic
KEAEDVLDEVRKAVEESIKHVKRVLEEVEEIVRRSIKHARDSLRKVKEVIDKVRTLVRR

SEQ ID NO: 20950 - protein, 55 aa, Artificial Sequence
  Synthetic
ERVRREIKRLLDESREVLKEVTKRIRKVSRDSERVVEKVHRDSKDVLDKVREDVR

SEQ ID NO: 20951 - protein, 57 aa, Artificial Sequence
  Synthetic
SSLEKAEDEVRELLRDVERVLKEVRDRIEELNRKVNEVLRRVIEESERLLREVLERV

SEQ ID NO: 20952 - protein, 59 aa, Artificial Sequence
  Synthetic
SEKVRRLVDKVRETVTDIVRRVTRLLEESEESVRRLIEKVKKLNEESRRIVEKIEKDAR

SEQ ID NO: 20953 - protein, 57 aa, Artificial Sequence
  Synthetic
SELERVEEDVKRVNKEVNDTLEKVIRDSKRVLDEVEERTRKVKRDSERLLERVERAV

SEQ ID NO: 20954 - protein, 59 aa, Artificial Sequence
  Synthetic
EEVVERVLEESRRSVETLIRDVERVNKKSREAVERNIRRSTAANERSKKIVKEIIDTAK

SEQ ID NO: 20955 - protein, 59 aa, Artificial Sequence
  Synthetic
DEAEDVVRRVREEVERLIRRSREVAEESKRTVDKLRRELEELLRRSRETVERIKKLIDE

SEQ ID NO: 20956 - protein, 55 aa, Artificial Sequence
  Synthetic
DKVREDIERVLREVEEVDKEVKERVRKVDEDSKKEIKEVKDEIRRVDEESRERAE

SEQ ID NO: 20957 - protein, 59 aa, Artificial Sequence
  Synthetic
DEAEKVLEKARDLVRRNIERSRRVLEENKKSVDDLIRRNEETNRRNEKSVDEVKKLVDN

SEQ ID NO: 20958 - protein, 55 aa, Artificial Sequence
  Synthetic
DDVLREVKRVLDEARRVSEEVEKESRRVLEEAKRVAEEVHKRSKKVVDDVKERAR

SEQ ID NO: 20959 - protein, 61 aa, Artificial Sequence
  Synthetic
SELEDVKRRIDKVVREVEEVVREVSERSKKVLEEVRRSAERVNREIERVLREAKDEVRRRT

SEQ ID NO: 20960 - protein, 56 aa, Artificial Sequence
  Synthetic
AKRVLEEARKIVDRLRKIVEEVVRRSEELIRRLKKINEDSLRRVEELVKDLIREVS

SEQ ID NO: 20961 - protein, 60 aa, Artificial Sequence
  Synthetic
KEAEEVVERVRELIERLRRRVTEMLRESKRLVEENIKRSEDALKESERLVDKLRELVKRT

SEQ ID NO: 20962 - protein, 55 aa, Artificial Sequence
  Synthetic
DKVLRTIEKLLDDVKKEVEKVNEDSKRLLRDVERVSKEVNDESRRVLEEVKREAK

SEQ ID NO: 20963 - protein, 59 aa, Artificial Sequence
  Synthetic
SELEKIVEKIKRIIDESRRTVEESVRKSEKIVEEVKKRLEELVEEVRKIVEEIVRIIRN

SEQ ID NO: 20964 - protein, 58 aa, Artificial Sequence
  Synthetic
EELEKVKRMVDKVVDDVRKVNDTSRKRSKETLEEARRKVEEVKRRIDKVLRDVKREID

SEQ ID NO: 20965 - protein, 60 aa, Artificial Sequence
  Synthetic
DEVEEVVKRVKEVVEKIVRELEKLVEESKKIVEDAVREDERLVEKIERVVRRLVEEVRRS

SEQ ID NO: 20966 - protein, 55 aa, Artificial Sequence
  Synthetic
EEVKKLVDEVVKEVEEVIKRVEDLDRRVLEENRESTRDVERRVREVVKRVREALK

SEQ ID NO: 20967 - protein, 59 aa, Artificial Sequence
  Synthetic
SDAERVVREVERLVDTTRKLVKKVVEDIRRVVETAKRDLDRVVKRSEDVVREVKKLIEE

SEQ ID NO: 20968 - protein, 55 aa, Artificial Sequence
  Synthetic
DRVIKLVRKLNKDSERKLREVRDRVERVIEEVEKRLREVKERSKETIEDVERARK

SEQ ID NO: 20969 - protein, 59 aa, Artificial Sequence
  Synthetic
DEAEKVVEEAKRRVKEVVERLREVADRNRRSIEELVKELRAVVEDSRKSVEDLVRRVRN

SEQ ID NO: 20970 - protein, 55 aa, Artificial Sequence
  Synthetic
EEVKKLVEDVIEEVRKVVKEVEDISRRVIEDLKRVLEEVEKRSRKLIKEARDETR

SEQ ID NO: 20971 - protein, 59 aa, Artificial Sequence
  Synthetic
DELREVVKRVRRLIEEVRRLVKELVDRVRKVIEELKRRSEDSARESERVVREIKKLVEE

SEQ ID NO: 20972 - protein, 58 aa, Artificial Sequence
  Synthetic
EELEDVDRDIERVREEVKRVVDEVRKRIRDVLEDARRESKRVLDRSRESLREVREAVR

SEQ ID NO: 20973 - protein, 59 aa, Artificial Sequence
  Synthetic
DELEELVKRVEDVIREIEERVRRLVRESERVVKEILKKSRKSVEKVKEVVDRAVDLVRK

SEQ ID NO: 20974 - protein, 58 aa, Artificial Sequence
  Synthetic
ERLKDVEREIRRVLRRAEKVVDEALKRSRDTLREVRKVSKEVREDIERVVKEADEAAR

SEQ ID NO: 20975 - protein, 56 aa, Artificial Sequence
  Synthetic
SVVDRVREELEKVLRHSKKVVEDVKREIDKVLKRSEDALRRVEEESKRVLEEVERD

SEQ ID NO: 20976 - protein, 59 aa, Artificial Sequence
  Synthetic
KDTLKKLVEEARKVSEDSRRRLERIVEEMRRVSEDSRRRLEEIVRENRKVVEEVRRRAT

SEQ ID NO: 20977 - protein, 56 aa, Artificial Sequence
  Synthetic
SVVERVREEIKRVLENSKRAVDKVREDIKRVLDESRKAIKEVEDEIRKVLEEVERG

SEQ ID NO: 20978 - protein, 59 aa, Artificial Sequence
  Synthetic
SDTVRRIVEEIEKVSRESVKRLEDIVREMKKISEESKETVDRIVEKIREVVKRLLEAAK

SEQ ID NO: 20979 - protein, 56 aa, Artificial Sequence
  Synthetic
SAVETVRKTIEDVLRNSERVLKKVREDSKKVLENSERVLKEVEDRSKEVLKEVEDG

SEQ ID NO: 20980 - protein, 59 aa, Artificial Sequence
  Synthetic
KKELDEIAEEIKRVSEDSVRKARELAERNKKVSDESVKRVKKIVRENEKVVEELLKAKK

SEQ ID NO: 20981 - protein, 60 aa, Artificial Sequence
  Synthetic
SEVDEIVRRIKEISKRSVDDLEKLARDNKKAVEEVLEELRKLLEENEKMVREVLEEVRRS

SEQ ID NO: 20982 - protein, 55 aa, Artificial Sequence
  Synthetic
ERLDRMLKEVIKHSEKVVRDVEETSKTVLKEIEDALKKVEEASKRVVDRLEEATR

SEQ ID NO: 20983 - protein, 60 aa, Artificial Sequence
  Synthetic
RRVDEIAKKIKRISEESVKTLDKIMEDARKIVKDVLDELRKLAEDNKRVVREVLERVRRS

SEQ ID NO: 20984 - protein, 55 aa, Artificial Sequence
  Synthetic
ERLRRTVERVIRHSREAVKRVKDEVEKVVKELEDVVRKVKEDSERVVKEVEEAKR

SEQ ID NO: 20985 - protein, 59 aa, Artificial Sequence
  Synthetic
SEAEDVVRRSKRSVERLKKELDDVVRESKESVERLVRRNDEVVKRSRESVDELTEAVKR

SEQ ID NO: 20986 - protein, 59 aa, Artificial Sequence
  Synthetic
KDLVERVERTVRTTLKELEDALREVKRMVEDTLKKAEDVNRRVAEEVKKSEKRLRDVAK

SEQ ID NO: 20987 - protein, 59 aa, Artificial Sequence
  Synthetic
DEVDDVVRKSEKSVEELVRKLETVVKRSEESVRELLEKNREVVERNERSVRELLERLEK

SEQ ID NO: 20988 - protein, 59 aa, Artificial Sequence
  Synthetic
KDLLKRVEDTARRVNREIEEALDRVRKAVEKTLKKLKDVNDEVRKESEKVLKELRDATK

SEQ ID NO: 20989 - protein, 61 aa, Artificial Sequence
  Synthetic
SDEDRVREMVRTVIEKLDRVLEEVERDSAKTDRDNKKSAEDVRRESKRTDDELKDVVRKAG

SEQ ID NO: 20990 - protein, 56 aa, Artificial Sequence
  Synthetic
VDEVVERAKKLVKRLEDRLREVVKESRRLVRRVVERNREVAERSKDLVRRLVEDTR

SEQ ID NO: 20991 - protein, 60 aa, Artificial Sequence
  Synthetic
SKEEEVERRVEEVIKELEEVLRRVEEEIKRVIDDNRRSARDVEEKSKRTDEELKDVVRKA

SEQ ID NO: 20992 - protein, 56 aa, Artificial Sequence
  Synthetic
VDEVARRVKEMVERLRKLAEEVVREAERVVREVVDENRKVVEESKRLVKELLERVK

SEQ ID NO: 20993 - protein, 60 aa, Artificial Sequence
  Synthetic
SDEERVDEEIKTVIEELKRSLKEVEDTIRKVIKENKDSAKRVKETSEKTDREIEDVVRKA

SEQ ID NO: 20994 - protein, 56 aa, Artificial Sequence
  Synthetic
VDTVAKEVRDLVRENVERNKEVVKRAKKVVDDVVRENRKVAEDSKKLVKEVKDRVR

SEQ ID NO: 20995 - protein, 61 aa, Artificial Sequence
  Synthetic
DDEERVKELIKEVIRELEESLRRVKEDSKRTDEKNKKSMEDVERKIERVRRRLDEVVKEAG

SEQ ID NO: 20996 - protein, 56 aa, Artificial Sequence
  Synthetic
VDEVAKRATDIVKRNAELNKEVVDESRRLVEEVVDRNEKVAKRAEEIVDELERRTR

SEQ ID NO: 20997 - protein, 60 aa, Artificial Sequence
  Synthetic
DEFKEVVDRVKRLVTENVRENRRVVEESERLVKEALKRLEDLVRRAKEIVDRLDDLVRKI

SEQ ID NO: 20998 - protein, 59 aa, Artificial Sequence
  Synthetic
KDLLKRVRDSIETVKKELDDSMKKVSDDDERSKKELEDVLEEVRKRIEKVMKELRDTSR

SEQ ID NO: 20999 - protein, 60 aa, Artificial Sequence
  Synthetic
DEVREIVREVKRLVEENVRRNDDVARKSRKLVKENKDRNKEVVDRLRELVKRALDEVRRI

SEQ ID NO: 21000 - protein, 59 aa, Artificial Sequence
  Synthetic
EKLLKEVEDMIRTVKKELKDSARRVSEEDKRSKEDLKRSAKEVEETIKDVLRKLDTETT

SEQ ID NO: 21001 - protein, 60 aa, Artificial Sequence
  Synthetic
DEAEEVVRRVERLVKENVKLNKEIVKRSRDLVKELEERLREIVKRVEEIVKRAKDLVEEI

SEQ ID NO: 21002 - protein, 59 aa, Artificial Sequence
  Synthetic
KDLLKRVREVIERVDRELDKSMKEVHDENEKSVRRLREVLERVKKRIKDVTKELEDRTR

SEQ ID NO: 21003 - protein, 60 aa, Artificial Sequence
  Synthetic
SLVEEVVRRVEDLVRKNVRLNEEIVRRSEDLVRRNVELNEELVRRAEDLVRRIEELVKKI

SEQ ID NO: 21004 - protein, 59 aa, Artificial Sequence
  Synthetic
EELLRKVEKMIERVVRELKKSAKRVHDENRRSDEDAERSMERVERVIERVERDIDRRLR

SEQ ID NO: 21005 - protein, 60 aa, Artificial Sequence
  Synthetic
DEAREVVTEVKRLVRENEERNKEVVKRSKKLVEDLKDLARKLVDRAKKLVDTLRDLVRKI

SEQ ID NO: 21006 - protein, 59 aa, Artificial Sequence
  Synthetic
ERLLEDVERKIETVIRELRKSMEEVKESSRRSNEELKKVADDVERTIRKVERELEKEST

SEQ ID NO: 21007 - protein, 60 aa, Artificial Sequence
  Synthetic
SDAERVVDDLERRVRENLEDLRRAVREVREVVKKNLETITRVLEEVERVVDRLSKLVKEG

SEQ ID NO: 21008 - protein, 55 aa, Artificial Sequence
  Synthetic
REVDKVLKDVARKVEEANEKSRRVLEEVEELVERVNRELHETLKRVAERVKRDAT

SEQ ID NO: 21009 - protein, 60 aa, Artificial Sequence
  Synthetic
SDEERVTKVLEEVKERIERANRTLEKRVREVTDRVREVNERSDKVNRDSERKIREIIKRL

SEQ ID NO: 21010 - protein, 55 aa, Artificial Sequence
  Synthetic
EKLVRDLRKIVEENERKNRDLLRKIEKIVEEIERRNRDVVRRSKESVERLREEVR

SEQ ID NO: 21011 - protein, 60 aa, Artificial Sequence
  Synthetic
DADRELRRVAKEVTDRSRRVLEDSERVVRESHEKSKRVLEDLRRVVKEVAERIDEVLKRV

SEQ ID NO: 21012 - protein, 59 aa, Artificial Sequence
  Synthetic
EEVARDVVRKLKRIVTENLKKNTKVVRDSEDLVRRDLEEVDRVVKKVKKDVDEIERDVK

SEQ ID NO: 21013 - protein, 59 aa, Artificial Sequence
  Synthetic
DEVREVVKELKRIVDELLDELRKVVEELEKIVTDDLRRIEEAVKRSKDSVEDLERRLKS

SEQ ID NO: 21014 - protein, 59 aa, Artificial Sequence
  Synthetic
KDLLRELEEVARRVEEKIKKAVRELEKVMREVNRKSTEVLKRLEKVVRDSEKRIDDATR

SEQ ID NO: 21015 - protein, 59 aa, Artificial Sequence
  Synthetic
SDVDEVVKEVKAIADDSTRLNKESAEKSRELVDRDTKKNKRSVEELRRLVTEILKVVES

SEQ ID NO: 21016 - protein, 59 aa, Artificial Sequence
  Synthetic
DELLRKLEEVVEKVRRDDERSHRESERVSRESTKRSRDSHRESREVVTEVKKEVDRAAK

SEQ ID NO: 21017 - protein, 60 aa, Artificial Sequence
  Synthetic
DEAEEVVDRARKLVKESEDLNRRSVEESEKLVTTSTELNKRTVDRLREIVEEVKDLVRKT

SEQ ID NO: 21018 - protein, 59 aa, Artificial Sequence
  Synthetic
EDVLRKVKKTLEEVKRRDDEAMRRSHKKDDDSRKRDEESMRRSDEVVREVIEEVREAER

SEQ ID NO: 21019 - protein, 59 aa, Artificial Sequence
  Synthetic
DEIEDVVRKVEEMVKESKDRVDRNVEESRRIVTESREKVKDSVRRVEEVVKEIKKLAEQ

SEQ ID NO: 21020 - protein, 59 aa, Artificial Sequence
  Synthetic
DKVVKKVDDALKRVEKKDRDAIREVERVNREVEKDDERVLRDSERVLEEVRKRVEEVTT

SEQ ID NO: 21021 - protein, 59 aa, Artificial Sequence
  Synthetic
SEIDEVVERVRKAVEDSRKVVEDLIKTVEDAVREHERLVRRVVEEVDKLVEDIRKLLER

SEQ ID NO: 21022 - protein, 59 aa, Artificial Sequence
  Synthetic
ERMLRKVDEVIKRVAREDERVVKKLEDVLRDVKRRVDEASKEVDRRLKEVKKRVEKEAE

SEQ ID NO: 21023 - protein, 59 aa, Artificial Sequence
  Synthetic
KEAEEAAKRAEEAAKRHEDLAREAAKEAKRAADESRKAAEEAAKRAEKAARDIADLARK

SEQ ID NO: 21024 - protein, 59 aa, Artificial Sequence
  Synthetic
EKAARKAEDALRRAREIAKKASEDAKRALDEARKADEDAARKAEKALKEAEDAAREARR

SEQ ID NO: 21025 - protein, 63 aa, Artificial Sequence
  Synthetic
DEEEELKEVVREVAERVEEVNRKSERELDKARKDSERALEKLERVLREVAERVKRVLDEASKR

SEQ ID NO: 21026 - protein, 56 aa, Artificial Sequence
  Synthetic
VKDVIRELEEVVRRNTDLVRKVEEEIRKVVEESKRSIEEVIKRLRKLVDDIRKAIK

SEQ ID NO: 21027 - protein, 63 aa, Artificial Sequence
  Synthetic
DEREKLAEVVKRVAEDVKRMNKESREALKRVKEEVKRVNEKSEKVTREVKKEVERVIEEAKRT

SEQ ID NO: 21028 - protein, 56 aa, Artificial Sequence
  Synthetic
VEDVIRELEKVVEDNKRLVEKVVRDARKVVEDNKELVDRNVKRLEEVVREITKEIK

SEQ ID NO: 21029 - protein, 60 aa, Artificial Sequence
  Synthetic
RDVDELVRELRDVVRKVLETARDSVRELKRIVTESLRRAEDLVKEITDVVREVLDAVRRA

SEQ ID NO: 21030 - protein, 59 aa, Artificial Sequence
  Synthetic
REVVKKLRDVIREVKEDVERVLKEVRDVNREVNKIDKEAVERIRRVLDEVRKRVDEAAR

SEQ ID NO: 21031 - protein, 59 aa, Artificial Sequence
  Synthetic
KEIDDVVRELKEIAKRDEDKVRRVVEDLERVAREDLRKVREVVKELRRVVKTLLDLVRR

SEQ ID NO: 21032 - protein, 55 aa, Artificial Sequence
  Synthetic
KRLDDVLREVADIIRRSIRDLERVLEEVKRIIETSNDELRKVLKEVRETITEAER

SEQ ID NO: 21033 - protein, 60 aa, Artificial Sequence
  Synthetic
SEIDEMVRKLKEMARRDLETVRRVVERLRKLAEDDLRRVRKVVKKLKELAKDIVRLVEEG

SEQ ID NO: 21034 - protein, 55 aa, Artificial Sequence
  Synthetic
ERLRKVLKEVKDIIRKSNKELDEVLRDVERIIRESIEELRRVLEEVKKIIKEARD

SEQ ID NO: 21035 - protein, 59 aa, Artificial Sequence
  Synthetic
DEVDEAVRRLEEIVTRIEKDVDDVARRSEESAKEVEKAVRKVVEEHKKVAEDIRKLVED

SEQ ID NO: 21036 - protein, 59 aa, Artificial Sequence
  Synthetic
REVKERLKKVLDKVRKRIKRVVERLEEAARKSRKIIRDAKEELERVSREVEKVIRDVRR

SEQ ID NO: 21037 - protein, 60 aa, Artificial Sequence
  Synthetic
EEVKELVERLRDLVRESEKRVDEVVKRLEDLVRRNEELNRELVTRLRDLVRKLEEKVKDT

SEQ ID NO: 21038 - protein, 59 aa, Artificial Sequence
  Synthetic
KEMVREIKRVVDEVRKRDKEALDRLKKVIEEVRRKVKRSEDEARRVVEEVKRIVDRVET

SEQ ID NO: 21039 - protein, 60 aa, Artificial Sequence
  Synthetic
REVDDLVRRLEELVRRNEKKNEDVVRESKELADRSRKLVKELVKRLRELVKTVVRLVEET

SEQ ID NO: 21040 - protein, 59 aa, Artificial Sequence
  Synthetic
KELVRKLKKVVDEVRERIDRSTEEVRRVSKESKDIDKRAKEEIEEVLRDVEKKLRETAT

SEQ ID NO: 21041 - protein, 60 aa, Artificial Sequence
  Synthetic
DEFRDVVRKLEKLVEDITREAEEVVKISKALAEENKRLNDELVDRLRRLVEEVRKKVEDT

SEQ ID NO: 21042 - protein, 59 aa, Artificial Sequence
  Synthetic
KEVVKRVKDVVDRVRDEVRRVAEKVDRVSKESKRIIDESTKRAREVLERVRKRVEDERK

SEQ ID NO: 21043 - protein, 60 aa, Artificial Sequence
  Synthetic
SEVDDIARKLRDLVRRNKELNDEVVRRSEKLVKENKELNEELVRRLKELVDRLEDEVRRT

SEQ ID NO: 21044 - protein, 59 aa, Artificial Sequence
  Synthetic
KEMVKKLRKVVEEVRREIDDSMRKVKKVSEDSKRRIERSTEEIEEVAKRVADKVTDVER

SEQ ID NO: 21045 - protein, 60 aa, Artificial Sequence
  Synthetic
RELEEVVRELRKLVTEDLDRVRKSVEESERVVREDERRVDESVKRTREIADEVRRLKEEG

SEQ ID NO: 21046 - protein, 55 aa, Artificial Sequence
  Synthetic
EELKKVLKEVRKVVTDSERRDKEANRKVEEVIRRSKKKDEDAHREVRKVVEDVRT

SEQ ID NO: 21047 - protein, 60 aa, Artificial Sequence
  Synthetic
SKDEKLEKVIREVKRVIERVSKESEDVLRKVRKVIEDVSRESRRVLEDSRRVLERVAREG

SEQ ID NO: 21048 - protein, 56 aa, Artificial Sequence
  Synthetic
VDEVVDRARRIVDDVDRLNREVVKRLKDLVEDLRRLNEEVVRRNKELADTVRKDVR

SEQ ID NO: 21049 - protein, 60 aa, Artificial Sequence
  Synthetic
SEDEKLKEVVDEARKILEDADRELKRVVKEVEDVIRDVSKKSTEVRKEVKEILKEAADKG

SEQ ID NO: 21050 - protein, 56 aa, Artificial Sequence
  Synthetic
VDKVVDDLRKLAEDLLRENKEVVDKLRELVERVKKLNEDVVREARRLADEVLKRVT

SEQ ID NO: 21051 - protein, 60 aa, Artificial Sequence
  Synthetic
SEVERLEERLKRIVEDIKRLVKKSVEDSRKIVEEIRKLVKDSVEKNKRSVEEVEDIVRKD

SEQ ID NO: 21052 - protein, 55 aa, Artificial Sequence
  Synthetic
ERVKRVLREVEERVKEVKKENEKAHEEVRKDVERVLEDDDRALRESRERAERVKK

SEQ ID NO: 21053 - protein, 60 aa, Artificial Sequence
  Synthetic
TEVDELLDSLRKIVTEIEKLVEESEKRLREIVKTIEKLVKDSVRTLKKIAREIEELAKDR

SEQ ID NO: 21054 - protein, 55 aa, Artificial Sequence
  Synthetic
ERVEKVLREVRDRVKKVNKRNEDALREVDKKVKDVNKENEDVLEEARRVVEEVRR

SEQ ID NO: 21055 - protein, 60 aa, Artificial Sequence
  Synthetic
REDEKIKKVVEEVRKKLEDVDKNSRDAIEDDKRVNKEVDRNSERAFKENEDEIRKVKEAG

SEQ ID NO: 21056 - protein, 56 aa, Artificial Sequence
  Synthetic
ADEVVKELERIVAEVEKLSREVVKRLKENVKRVRDLSKRVVEYLKEDADRLKEDVR

SEQ ID NO: 21057 - protein, 59 aa, Artificial Sequence
  Synthetic
DEERKIRKAVEDVRRVIKEVEENSKRVFDENKKVIDDVRKEVEKVLKENRDVIKEVRDK

SEQ ID NO: 21058 - protein, 56 aa, Artificial Sequence
  Synthetic
ADEVLKELKKLVEELEKLSREVVKYLREDAKRLKDLVRKVVEYLKEDARRLDEEVR

SEQ ID NO: 21059 - protein, 57 aa, Artificial Sequence
  Synthetic
SVVEKLLEDARRVVEKVREAVERNLKKVRDLVKKLREDVKRSKDHLEEVVRKLEEAK

SEQ ID NO: 21060 - protein, 59 aa, Artificial Sequence
  Synthetic
EEVERRVEEVIRDLERVLREVRERVRRINEESRRMLEDVERESRKALRDLEEVLDRVRR

SEQ ID NO: 21061 - protein, 58 aa, Artificial Sequence
  Synthetic
SVVEELRKRVEDVVDEVREVVERNRDLMRRVAEESKKIVDDSLRHIKEVVDEVRRAKN

SEQ ID NO: 21062 - protein, 59 aa, Artificial Sequence
  Synthetic
ERVKKRVRDVLRKLREVLERVAEEVKKVNKRSREVNKRVEEKSEEVLRDLERVLREVET

SEQ ID NO: 21063 - protein, 59 aa, Artificial Sequence
  Synthetic
SEVEEVVERLRRKAEEDLRRVEEAVKEHRRVVKEDLDRVRDAVERHREVVETIRKLKED

SEQ ID NO: 21064 - protein, 55 aa, Artificial Sequence
  Synthetic
EKLKRVLKEVEEVVRESKERLREVHEEVRKVIEDSKRILKTVHDDVRRVIEEVKK

SEQ ID NO: 21065 - protein, 59 aa, Artificial Sequence
  Synthetic
DDVERVLKELDELLKRDETEVREVEKRHREVLETIERRVREVIERHKEMLRRLAELVRS

SEQ ID NO: 21066 - protein, 55 aa, Artificial Sequence
  Synthetic
EELKKVRDKVRRVIEESKRRLEELHEEIRRLITELKRRLEEVTEEIKRAIDELRR

SEQ ID NO: 21067 - protein, 59 aa, Artificial Sequence
  Synthetic
DEVEDVVRRLRKIVEDIRRDVERVVEEHDRVVRKLKRRVEEAVEEHRKVLEEIKKVKEN

SEQ ID NO: 21068 - protein, 55 aa, Artificial Sequence
  Synthetic
EDLKRVLKEVEDVVREVDKILTDATERVKRVITEVKDILRRVHEEVREVIKRVKE

SEQ ID NO: 21069 - protein, 59 aa, Artificial Sequence
  Synthetic
DEVEEVVRELREILKRDLDEVRKAVEDHERLLREITKDVKRVADRHRDLLRKIRELKEN

SEQ ID NO: 21070 - protein, 55 aa, Artificial Sequence
  Synthetic
EKLKRVLKELEDVIRESEEILERVTRKAERVIERVRKILEEATKEVERVIREVRR

SEQ ID NO: 21071 - protein, 55 aa, Artificial Sequence
  Synthetic
EEDERIEKVTEEVKKVIEDVTRLTETVMRESEKVIEDVTRDSDRVRKEVKKVLEK

SEQ ID NO: 21072 - protein, 56 aa, Artificial Sequence
  Synthetic
VDEVVKRLKELVTRLAEENKRAVDTNRKLAEDLKELNRKAVEELKELLRRVDERDR

SEQ ID NO: 21073 - protein, 56 aa, Artificial Sequence
  Synthetic
SEDEEIDRVDKDVKRVSDTSNKILDDVEKEVDKVIREVTAESKKVLDEAKKVLDKV

SEQ ID NO: 21074 - protein, 56 aa, Artificial Sequence
  Synthetic
VEEVVRRLEKLVDDDRKLVEKVVKELRELLKELRDKNKEVVDELRRLAKTVDEEDR

SEQ ID NO: 21075 - protein, 60 aa, Artificial Sequence
  Synthetic
SAEEIAERVLRELRKVTKEVAEEDERVLREDEKVTDEVRKEDKRVLDEARKVIDDVRKKG

SEQ ID NO: 21076 - protein, 55 aa, Artificial Sequence
  Synthetic
EEVVKRVRENVKRTRELSKRSVEKNEENVRRTREMSKRTVKEIRDVVKELRDRVK

SEQ ID NO: 21077 - protein, 59 aa, Artificial Sequence
  Synthetic
SKREKAEEVLKEAKKVIDDVREKDRRALEEDKRVTDEVARIAEKVLKDLRDVIEEVRER

SEQ ID NO: 21078 - protein, 55 aa, Artificial Sequence
  Synthetic
EEVVRRVRKVVTELEELSRRSVEENRRNAEETERLIREIVERARRVVETLKETVR

SEQ ID NO: 21079 - protein, 59 aa, Artificial Sequence
  Synthetic
SVEDILRKVAKEAEDVAREVTRILEEANRRVEEVVKRVKEENERANEKVERVVREVKAR

SEQ ID NO: 21080 - protein, 59 aa, Artificial Sequence
  Synthetic
EEVVRRVVETVKDIVKRLRDIVREVLKKNERIVEELKKTSDESKKRNDDIVRELDERAR

SEQ ID NO: 21081 - protein, 59 aa, Artificial Sequence
  Synthetic
SVEEILEEVLRRAEKIVKEVKDLDRRALEENKKAIKEVADELRKVDEEVKKVVDEVRRE

SEQ ID NO: 21082 - protein, 59 aa, Artificial Sequence
  Synthetic
EDVVRKVVRDVEDIVRRMREEVRRSVEDLKRNADENRDEVRKVVKENKDIVREMRERVR

SEQ ID NO: 21083 - protein, 59 aa, Artificial Sequence
  Synthetic
REKEKLEKAVRDARRVIERVERKDREALKEVERVVRESHKTLEDVLREIRKVATEVRRE

SEQ ID NO: 21084 - protein, 56 aa, Artificial Sequence
  Synthetic
VDKLMKTIEDLLRRVEELVDRSVKELKRLLDENRKLVKRVLEEIRRILKELRDEVK

SEQ ID NO: 21085 - protein, 59 aa, Artificial Sequence
  Synthetic
DEEEKLRKVKKEADDVIRRSHEEDERVLREVEKVVRESHEELKRVADEIRRVVEEVKTR

SEQ ID NO: 21086 - protein, 56 aa, Artificial Sequence
  Synthetic
VDKVMETIRRLVTKNRELVKRSVDELRDLVDKNRKLVERVVERIEEIAKKARDDVK

SEQ ID NO: 21087 - protein, 60 aa, Artificial Sequence
  Synthetic
KVVEEIEKEVRRSVEELERLVTEDLRKVKEVVKRAEEVAEEDERKVDEVVKELKRAAKEG

SEQ ID NO: 21088 - protein, 59 aa, Artificial Sequence
  Synthetic
EEMERRVREVLKRNEDVTDEVKKKIEESNRDLEDALRKVEKKIRESNERLRRVLEEVRK

SEQ ID NO: 21089 - protein, 60 aa, Artificial Sequence
  Synthetic
KEVEDVLDDVRRVVEKLEREVKKVEDTNERVVETLDEIVKEIRDRNRKVVETLKEIMKSN

SEQ ID NO: 21090 - protein, 55 aa, Artificial Sequence
  Synthetic
DKLRKAEKDLRDVAKEVRDKIRRADERLKRVIERVADEIRKVNTDLKRVADEVRK

SEQ ID NO: 21091 - protein, 60 aa, Artificial Sequence
  Synthetic
SEVEDVEREIEEVVEELRKIAEDDLRRNDTVVKEVRELVKRDREKNRKSAEELKKLKEEG

SEQ ID NO: 21092 - protein, 55 aa, Artificial Sequence
  Synthetic
EELKRVMEKITRVVEKVKEDVDRSKKKAEEVIREVEERLKRSLDESRKVLEEVKK

SEQ ID NO: 21093 - protein, 59 aa, Artificial Sequence
  Synthetic
REVEEVKKRVDEVVKRLRKLAEDDDRKNKESADRLRAIVDRDKKENTRSMETLRRLRER

SEQ ID NO: 21094 - protein, 55 aa, Artificial Sequence
  Synthetic
ERLEDAKKKLEDVIDEVRRRLEESNKRSRDVMEEVRKEVRRSLRESEEVVKDVEK

SEQ ID NO: 21095 - protein, 60 aa, Artificial Sequence
  Synthetic
DEVREIKRLVDELVKRLKELAERSRRLVDEVAKRSKELAKENLDLNEDIVRRLDEVAKRG

SEQ ID NO: 21096 - protein, 55 aa, Artificial Sequence
  Synthetic
KELKDVAREIERVLKEVEEEDDDALRKIEEVSKRSKEIIDESMEKVKKVMEDVTR

SEQ ID NO: 21097 - protein, 59 aa, Artificial Sequence
  Synthetic
SEVETVKKLIEDIVRESRRLVRENEELNKDVIRRSEELVRRSKEAVKRLVDKLDELRKR

SEQ ID NO: 21098 - protein, 55 aa, Artificial Sequence
  Synthetic
RELERAVEEIERVSRDSKREIKRSTEEVRKASERSRKEDEELERRARRVVEEVKR

SEQ ID NO: 21099 - protein, 59 aa, Artificial Sequence
  Synthetic
SELEKVVEEVEEIVRRSERHVTEVVKTSKKSVEDSNRHVAKVVEDVKKKVTELIEAARE

SEQ ID NO: 21100 - protein, 55 aa, Artificial Sequence
  Synthetic
KVLERVKRELKKAADRSRDIIRRVARETEEALRTSREIAKRVEDELRRVLEEVRK

SEQ ID NO: 21101 - protein, 59 aa, Artificial Sequence
  Synthetic
KELEDVVKRVREEVRRSLEHVAKAVKESEDSVRELKEEVDRVVKESEDIVRELEKLKRE

SEQ ID NO: 21102 - protein, 55 aa, Artificial Sequence
  Synthetic
KRLKEVDKELKRALEESRKIIKKVKEETKDVLRRVRDILRRSVRTSEKVLKEVKD

SEQ ID NO: 21103 - protein, 59 aa, Artificial Sequence
  Synthetic
SKVERVVEESRENAKRDLDRVDKVVKDSRRSVEEDLKEVRDVVKEVDDMLREAEELMRR

SEQ ID NO: 21104 - protein, 56 aa, Artificial Sequence
  Synthetic
EKVIREVAKESEDAFRESERRLREVLKRSAEALKRSRDILKTVRERVKRVIDEVRR

SEQ ID NO: 21105 - protein, 60 aa, Artificial Sequence
  Synthetic
REVEEVVKRSEKSVKEMEDKSRETVKKSRKSAKEDIDKVEEVVRRVEKVLREAKKLADDG

SEQ ID NO: 21106 - protein, 56 aa, Artificial Sequence
  Synthetic
KDVIEEVRKKSDEVLKRVRKINKEVTEESERAFDESRRILETVAREVKRVIDEVRR

SEQ ID NO: 21107 - protein, 59 aa, Artificial Sequence
  Synthetic
DAVEREVRKAEKIVEDDLRRVAKVVDESRKSVEKNEEDVRRVVEELRKILEEIDRLKRN

SEQ ID NO: 21108 - protein, 56 aa, Artificial Sequence
  Synthetic
ERVLRRVKKKLEDAVEDSRRILTELAEEVKTVVERSKRILDTVRDELKKALERVKK

SEQ ID NO: 21109 - protein, 60 aa, Artificial Sequence
  Synthetic
DEVDEVVEKLRRLLEDTIRLVREAVDYLRRNLEDLRRKIREIVERLKRLLEELRKLVKDT

SEQ ID NO: 21110 - protein, 56 aa, Artificial Sequence
  Synthetic
EKRVRDAADEVRRMNEEVKKIIDDARKELERVHRDVKREIDRVARELDEEIRRVEK

SEQ ID NO: 21111 - protein, 60 aa, Artificial Sequence
  Synthetic
DEVREMVKTLTDLLRRNRELVKRVVEELRKLLEETRKLVEDMVKELEDLLRELEKLARDT

SEQ ID NO: 21112 - protein, 56 aa, Artificial Sequence
  Synthetic
EKVVEEVARKVARANEDSNRILDEARKEVEKVNEEVRRIIKEVTDRLEKKVREVEK

SEQ ID NO: 21113 - protein, 59 aa, Artificial Sequence
  Synthetic
SKAERLDEEVDKIVRDLRRLVDELEKRIEKIVRDNRELVKRVRESNKRIVETLRRLKEN

SEQ ID NO: 21114 - protein, 56 aa, Artificial Sequence
  Synthetic
KREVDKIEKKLRDVVREVEEIVTRVDKRLKDVLKESREILKEVNDETKKVLDEVKT

SEQ ID NO: 21115 - protein, 59 aa, Artificial Sequence
  Synthetic
SEAEKVVRDVREIVERLRDIVRKVVEENEEIVKRLRKLVTDLVEENKRTVEALRDLKRR

SEQ ID NO: 21116 - protein, 56 aa, Artificial Sequence
  Synthetic
EEILRRVEEEARRAAKEVEERIRTVNRRTEKVLEEVRKIVKDATDTSEKALREVRE

SEQ ID NO: 21117 - protein, 59 aa, Artificial Sequence
  Synthetic
SRVEEVLRKVEEIVKRNEDLARKVVDESRKTVDKLRTLVEKVLRESRETVKRLIDLVRR

SEQ ID NO: 21118 - protein, 56 aa, Artificial Sequence
  Synthetic
EDLLTRVTDVLRKLRDRSREIIKRVVDETRRVLEEVKELIKRVLEETERVLREVRR

SEQ ID NO: 21119 - protein, 59 aa, Artificial Sequence
  Synthetic
SEVDEVVDRSRKTVKKMIDDVREVLERSRKNVKEDIERVRKVVRESEETVKTARRLKEE

SEQ ID NO: 21120 - protein, 56 aa, Artificial Sequence
  Synthetic
EEVLRRVREVTERATREVEELLKRSDEESERALKTSTDVLREVLERSDKVEEEVKT

SEQ ID NO: 21121 - protein, 60 aa, Artificial Sequence
  Synthetic
KEVEEAVRRVEESVRRLEEEVDRVVKENRKLVKDLIELAEEVVRRVKELVDRLRETVRRA

SEQ ID NO: 21122 - protein, 56 aa, Artificial Sequence
  Synthetic
KDVVTEVKKRAEDVDRRVERVIEEAEEVSREALKRVRDIIDTVRKVAETVLKEVKD

SEQ ID NO: 21123 - protein, 59 aa, Artificial Sequence
  Synthetic
KEKEVMDEVERVLEKVKEDNRRVVREVEDVLRRVEKENKEIVDEVKDVARKVLEEVRRR

SEQ ID NO: 21124 - protein, 55 aa, Artificial Sequence
  Synthetic
ERVLEKVKDVVRRSRDIVRRILEDAKDVVRKSREIAKKILEEVTEVVKRAREKVK

SEQ ID NO: 21125 - protein, 60 aa, Artificial Sequence
  Synthetic
SKLEELLKRSEKSVREAKRLVEELKRRSEETVRRNKELAERLEDESRKTVELLKRIVDSN

SEQ ID NO: 21126 - protein, 55 aa, Artificial Sequence
  Synthetic
KLLEEVEKESRKVVEDVRRVIEDVKRRSDEALKESEDIIRDVRRKSEKALRDVEK

SEQ ID NO: 21127 - protein, 60 aa, Artificial Sequence
  Synthetic
SELEDLLRRSKESVDRLRELIRRLEDESRKTVETLRDIVKKLKEENKKTVDDLRDIVRRR

SEQ ID NO: 21128 - protein, 55 aa, Artificial Sequence
  Synthetic
ELLERVREVSDKVLEELKKIIDEIRKRSEKVAEEVKDVIRKVNELSKKVLKDVKK

SEQ ID NO: 21129 - protein, 60 aa, Artificial Sequence
  Synthetic
RKLEELLKRSERSVEELRRKVTRLLEENDDTVRRLRELVTKLTDDSRKTVTRLRDIVRKD

SEQ ID NO: 21130 - protein, 55 aa, Artificial Sequence
  Synthetic
KLLEEVTKVSEKVAEEVRRVIKTVNDKSTEVLREVKRVIETVRRESEDVLEKVEK

SEQ ID NO: 21131 - protein, 60 aa, Artificial Sequence
  Synthetic
SKLEDLLRRVTEIVKRLEEIVRKLEERSRRTVKRLEELVDTLRKENEDTVRRLEKIVRDR

SEQ ID NO: 21132 - protein, 55 aa, Artificial Sequence
  Synthetic
ELLKEVRDVLETVVKRVREIIEKVRKESEDALRKVDKDIREVNRRSEKALEDVKT

SEQ ID NO: 21133 - protein, 59 aa, Artificial Sequence
  Synthetic
SEAEKIEREVDKVVEDHRRLVRADLERVERVVEEHRRLVKEDLDRVDEVVKRLRKLKED

SEQ ID NO: 21134 - protein, 56 aa, Artificial Sequence
  Synthetic
EDVLRRVRELLKTVHEEVKKVIKTSDDILRTVHDEVRKVIKTSEKILREVAEEVER

SEQ ID NO: 21135 - protein, 59 aa, Artificial Sequence
  Synthetic
KELEDATREVETVADEHRRVLEEDKRDVKEVVERHRRLLEDLRRKLEKVVRDLRKLLKD

SEQ ID NO: 21136 - protein, 56 aa, Artificial Sequence
  Synthetic
EDVLRRIEKKLKDVTDDLRRVIKESKDRLTKLHKEVEDALRRLRDRLRELEDEIRR

SEQ ID NO: 21137 - protein, 61 aa, Artificial Sequence
  Synthetic
RELEEAVKEVEKKIRELRERLKEVVERSTKKMDDLRKENEKVMRESSELVTELVKEIKDRA

SEQ ID NO: 21138 - protein, 56 aa, Artificial Sequence
  Synthetic
LKDLRKKVDDVARKVDKILEDLERESDTVLDRVKKVLERSRRDSEDVARRVEEKVR

SEQ ID NO: 21139 - protein, 60 aa, Artificial Sequence
  Synthetic
SELDELRKMVKEVLDRVRDLLKKLEDEARKVAEDNKRLLERNKREIEAALRRVEEIIRRR

SEQ ID NO: 21140 - protein, 58 aa, Artificial Sequence
  Synthetic
KRVREVLREVEKRIKELEDLVRKVLDKIRELIERLKRETDKVLEESKKLIKELSERLE

SEQ ID NO: 21141 - protein, 59 aa, Artificial Sequence
  Synthetic
DELEDVRKEIEDVRKENEDTVRESKDEIRRLEDTNRKTLKESRDDIEKARERVKKERRD

SEQ ID NO: 21142 - protein, 59 aa, Artificial Sequence
  Synthetic
EKDVRKVLKEVEEEARELVKLNRDVLEELRRRVRKLVEDNKDVTREVEDILKKLEEELK

SEQ ID NO: 21143 - protein, 57 aa, Artificial Sequence
  Synthetic
SMDETIRKLAEDNRRRSDETVERIERLAKKLDEDNRRVVEKSERLAKEVADKVRRVK

SEQ ID NO: 21144 - protein, 55 aa, Artificial Sequence
  Synthetic
ERVIKEVEDISRDLERKNKEVVERARRIVEKVKETNKRVLEEVEKIVRKLKEELK

SEQ ID NO: 21145 - protein, 60 aa, Artificial Sequence
  Synthetic
SVEEVVEEVRRVAEKVEEDVTRVIKEDEDIARELEKRIDDVIKESKTVADELLERLRRAG

SEQ ID NO: 21146 - protein, 59 aa, Artificial Sequence
  Synthetic
EEELERLLREVEELIERVKERHKRLVEDSKRLLDEVDKRLKDSNREVRERIEEIKRRVD

SEQ ID NO: 21147 - protein, 56 aa, Artificial Sequence
  Synthetic
DELEKIREEVREIVERSKREAKELLDRNKEIVKDLERKAREILRENRDRVRRLAEK

SEQ ID NO: 21148 - protein, 56 aa, Artificial Sequence
  Synthetic
SEVLDELRRIIETSEKLNRDVLRESKEVNRDLTRKLEEVLRRSKEDNKRLSEKIKE

SEQ ID NO: 21149 - protein, 56 aa, Artificial Sequence
  Synthetic
DELEAIKDEVRRIVRESEERAKKILRDVERMLDEIRKKLKEILDRNREVVDELKRQ

SEQ ID NO: 21150 - protein, 56 aa, Artificial Sequence
  Synthetic
SEVLKELRRIIEESKRRNKRVLDEIRKRAEDLRRVIKEVLDRSREINKRLSDEIRK

SEQ ID NO: 21151 - protein, 56 aa, Artificial Sequence
  Synthetic
DELEKIVREVREIVKESKEEARRILEENKKIVEELRRRLRKILEENEDMVRKLEKK

SEQ ID NO: 21152 - protein, 56 aa, Artificial Sequence
  Synthetic
SRVLEELERIIRESEEANKKVLEDSRRVNKKLSEELKRVLDESRRRNEELSKRIKD

SEQ ID NO: 21153 - protein, 60 aa, Artificial Sequence
  Synthetic
DELRDLEREIRRIVEESERHLKEVLERNHEASKRNRDDLKRMVDDIRRKVEEVRKLREEG

SEQ ID NO: 21154 - protein, 60 aa, Artificial Sequence
  Synthetic
AETVDRVLEKLKRIVEDSERRVKEVLKELEENSKRIKDETKDVLRKVEEIVERLRKEIER

SEQ ID NO: 21155 - protein, 60 aa, Artificial Sequence
  Synthetic
DELEELKEEVKRAVDENRETNKRALDRNHEISKDSEDHLRESSERIRRRIEELARLVEAG

SEQ ID NO: 21156 - protein, 60 aa, Artificial Sequence
  Synthetic
RETVKKVLKELREEIERVKRESEKVVKAVRDNSKRSEEKVEEVLERNKRIVDDVLRKIKK

SEQ ID NO: 21157 - protein, 60 aa, Artificial Sequence
  Synthetic
DELKEAEDRVREVVRENEERLRKALEENHKISRDSEKHLRDLERTIKEIVKRVRDLRRRG

SEQ ID NO: 21158 - protein, 60 aa, Artificial Sequence
  Synthetic
KDTVEKVLRDLRRIIKEVKERSREVLKRVRENSDRSLKKVEEVLKRLEDIIRTVKEEIKK

SEQ ID NO: 21159 - protein, 60 aa, Artificial Sequence
  Synthetic
EDAERALKKIEEIVRRLTEELKRVLDANRESVDRLRRELEEVLKRNRELVRKLEKILEER

SEQ ID NO: 21160 - protein, 56 aa, Artificial Sequence
  Synthetic
REVVERLKKIIADLDRVVEEVIRTSRKVIKELEDTVRRVIEELKRVSDELKKKVED

SEQ ID NO: 21161 - protein, 59 aa, Artificial Sequence
  Synthetic
DKLEELLKRVEELVERLKEESERVLRRNHELSEKLRRILEEILKRNHDLSRDLEDRLRK

SEQ ID NO: 21162 - protein, 56 aa, Artificial Sequence
  Synthetic
DEVVKRVEDIIEKVREDLERSDEKLNDNVRRLEREVREVLKAVEDNARRLAEKTKT

SEQ ID NO: 21163 - protein, 59 aa, Artificial Sequence
  Synthetic
SEAEKLLEEVKDLVRRLKKDLERVLRDNHRLSEELRRRLREILEENKKLIDTLREIREK

SEQ ID NO: 21164 - protein, 56 aa, Artificial Sequence
  Synthetic
KEVAEKMRKIVEELRKEVEEVLKALKENLDRLRREVEKVVERIEDTLRELKKRATD

SEQ ID NO: 21165 - protein, 60 aa, Artificial Sequence
  Synthetic
SEAEKVLEEVKRLVEDIERKLREMLRRDNEISRKVRDDLRKILEENNELSRRVEEEIRRI

SEQ ID NO: 21166 - protein, 56 aa, Artificial Sequence
  Synthetic
EEVVEALEKVVRDVARRLEDVIRRVAENAKRLEDDLRKVEEELKENADRLEERAKK

SEQ ID NO: 21167 - protein, 59 aa, Artificial Sequence
  Synthetic
SEVEKLLEKLRELVERVEREARRILEENKELIKESLKRIRDLLEDNKRLIREVKEILRR

SEQ ID NO: 21168 - protein, 56 aa, Artificial Sequence
  Synthetic
KDVVKRIRDIAEKVRRDLKRVIDAVRDTSRESDRRLRDVIREVDESSRELVREIER

SEQ ID NO: 21169 - protein, 59 aa, Artificial Sequence
  Synthetic
SDMERLLRELEELVKELRERLRRLLEENKDLIRRSLDRARKLVRRIEELVRKVKEDLDR

SEQ ID NO: 21170 - protein, 56 aa, Artificial Sequence
  Synthetic
EDVLRKIEETARRLVKEIEDVIREVERTSRESDKKLEDVIDKLRKIVRKVLEELRT

SEQ ID NO: 21171 - protein, 59 aa, Artificial Sequence
  Synthetic
SEVEDLVRELERLVREAKKALDDLRRKLEELVRDSLRKAEELLKENHDLSREVKKLLED

SEQ ID NO: 21172 - protein, 56 aa, Artificial Sequence
  Synthetic
KKVADELRRIAKRLVEELERVIRELEKIAKESDERLKEVIDRLRENVERLVRELRR

SEQ ID NO: 21173 - protein, 60 aa, Artificial Sequence
  Synthetic
KELEDLDRDVRRVVEELREELRRLEEEDKRSVEENEERLERLERRLRKKVKELEEKRKRI

SEQ ID NO: 21174 - protein, 60 aa, Artificial Sequence
  Synthetic
REEVRRVLEELREKIKRVLEEIEEVLRRSREINKRLRDRTRTVAKRLKEIVDDVLRKVET

SEQ ID NO: 21175 - protein, 60 aa, Artificial Sequence
  Synthetic
RELEELLKEVEKAVRENTKLLKDLLDKDKKSVKENEETLRDLERKLREVVERLKRELKDI

SEQ ID NO: 21176 - protein, 60 aa, Artificial Sequence
  Synthetic
EKRVRDVLKRLREIIDTVKKVTKEVMERSEEINRRLLKRTKDVLRELEKIVKTVLDEVRK

SEQ ID NO: 21177 - protein, 56 aa, Artificial Sequence
  Synthetic
SEVDKVREDVKRLIEDAERVSDDVDRRVKRLAEALKETSDKVKEDVERLVRDIKRE

SEQ ID NO: 21178 - protein, 59 aa, Artificial Sequence
  Synthetic
EETLRRVLRKVEDVIRRNKEDNEKVLKDAKRVVEEDKRENEKALERIERIVRKLKEDTR

SEQ ID NO: 21179 - protein, 56 aa, Artificial Sequence
  Synthetic
SEAEEVVRRVEKLAEDIKRVIDKSLEDVERLVRDAKRRSREVLREVEKLVEDITRR

SEQ ID NO: 21180 - protein, 59 aa, Artificial Sequence
  Synthetic
EEILRRALEKVERVITENKKENEDALRDAKRKIDKDKEDNKKVLDDVRRIIEELKEETR

SEQ ID NO: 21181 - protein, 61 aa, Artificial Sequence
  Synthetic
DEVDRVAEEVKKLIDDVKRVSDEMLKRSEDLIREVKKTSDDVLETVERLIRDVERKVEERV

SEQ ID NO: 21182 - protein, 59 aa, Artificial Sequence
  Synthetic
DEVLKRLLDKIREDAKRNKDDNKRNLDESKKEVDRNKDENRRVLEKVKETVKRLKDEVK

SEQ ID NO: 21183 - protein, 61 aa, Artificial Sequence
  Synthetic
KEVEEMLKEVKKLIEKVKRRSDDVLRRSEELARDLKKMSDDVLREVKKLIDDVKRTVDERV

SEQ ID NO: 21184 - protein, 59 aa, Artificial Sequence
  Synthetic
REFLKEVLDRVRERVEENERRNDENLKKSKKRIDENKEKNERVLRKIREIARRLKEELR

SEQ ID NO: 21185 - protein, 61 aa, Artificial Sequence
  Synthetic
SEVDRVLKTVEELIRRVKRISDRVLTEVKKLVDDVRRVVEKSRRDVEELVKEVKRSVDERV

SEQ ID NO: 21186 - protein, 59 aa, Artificial Sequence
  Synthetic
KEMLERALKEIKEEVKRNEDDNRRMLREIEELAKRNKEENKRVLDEVRDIVRRLAEEVK

SEQ ID NO: 21187 - protein, 61 aa, Artificial Sequence
  Synthetic
EEVERVREEVDKLLKTLKEVSDRVLKASKDLLDRVKEIVEKSLRDVKRLIDDVKRKVDERV

SEQ ID NO: 21188 - protein, 59 aa, Artificial Sequence
  Synthetic
KEVLERLLKKAEEIIRKNKKENDDNLEESRKEIEKNEEDNRELVKRIEDEVRRLKKEVE

SEQ ID NO: 21189 - protein, 61 aa, Artificial Sequence
  Synthetic
SEVEEVLRRVRELIERVKRIVDESEKEVRRLIEEVKKIVEESLKRVEELLRDVKRRVDERV

SEQ ID NO: 21190 - protein, 59 aa, Artificial Sequence
  Synthetic
RKMLREVLEKIKKIVKDNEDDNRRALTEVRERVRENVEENKKVVDRVRKIAEDLRKEVE

SEQ ID NO: 21191 - protein, 61 aa, Artificial Sequence
  Synthetic
SEVERVLEEVKKLIEDVKRVVKESEEEVEKLIRDVEREVERSKRTVDELVKDVKRAVDRDV

SEQ ID NO: 21192 - protein, 59 aa, Artificial Sequence
  Synthetic
REVLTKVLREVEEAVRRNKERNKRALEEVKKTVDRNREDNKRMVDKVRETAKRLKDEVR

SEQ ID NO: 21193 - protein, 56 aa, Artificial Sequence
  Synthetic
SSIEKVREDVKELIRDVERAVKRVKEESKKLVDDLRRAVKRVEEESRKLLKDLERN

SEQ ID NO: 21194 - protein, 59 aa, Artificial Sequence
  Synthetic
DDDVRRVLREIERIVKEVKDDLKRVLEESERSIRRVKEELRRVLEDNRRLLKEVKDRAR

SEQ ID NO: 21195 - protein, 60 aa, Artificial Sequence
  Synthetic
SEVEAVLREVEERVDRVRKESEKTLREVERLVREAKRRSKKSLDDVKKKVEEVKKKIRDI

SEQ ID NO: 21196 - protein, 55 aa, Artificial Sequence
  Synthetic
EEVKREIEKLVEDVRRVSDRVVEEIKELVKDVERMSRKVVEDIKRLAEDVRREAE

SEQ ID NO: 21197 - protein, 60 aa, Artificial Sequence
  Synthetic
DEVERVLEEVKERVDRVKRESEKSLKEVEKLVRTNERLSERTLKEVRDLVEDAKKKIDDI

SEQ ID NO: 21198 - protein, 55 aa, Artificial Sequence
  Synthetic
EEVRREIEKLVEDVKRVSDKVVEDIRRLAEKLRRDNKRAEDEIRKLVRDVERRAK

SEQ ID NO: 21199 - protein, 60 aa, Artificial Sequence
  Synthetic
DDLERVLEEVRKLVKELKERSRKSLEDVRRSNERNETESRRTLREVRELVKKVKEVIDRT

SEQ ID NO: 21200 - protein, 55 aa, Artificial Sequence
  Synthetic
EKVKEDIRRLVEEVERVSREVVERIKKLADESRKKNKKVIDEIKELVKRVRDRAK

SEQ ID NO: 21201 - protein, 60 aa, Artificial Sequence
  Synthetic
REMEEVLKEVEKRVRDIEDESRKTLERVDKLVKKNKRDSERTLKEVEDLVREVKKEIRRI

SEQ ID NO: 21202 - protein, 55 aa, Artificial Sequence
  Synthetic
EEVKREIKKLADRVREVSERVVREIEKLVRDIKRRNEEVIDEIRKLVEDVKREAK

SEQ ID NO: 21203 - protein, 60 aa, Artificial Sequence
  Synthetic
KEVEDVLEEVKELVKELKRVSEETLRRVEKSNRENEEKSKTTLKEVEDRVERVKEEIKKT

SEQ ID NO: 21204 - protein, 55 aa, Artificial Sequence
  Synthetic
EEVKREIKKLVEEVRRVSEEVVREIKKLVDKSRRVNEKVIEDIKELAKEVEEAAR

SEQ ID NO: 21205 - protein, 60 aa, Artificial Sequence
  Synthetic
SELEEILERVRKMAEDAERISEETLRRSEELIRRVKDLSRESLERVERLIRKVKKEIEEI

SEQ ID NO: 21206 - protein, 58 aa, Artificial Sequence
  Synthetic
EEVLRVIKAIEDLLRRVERVSREASKTSEELLKDITRVSEKSKEDIKRLLDDVRRKVK

SEQ ID NO: 21207 - protein, 60 aa, Artificial Sequence
  Synthetic
SELDEVLKTVEELVRRIKEKLKEILDRSRKLVEEARKLSEDSLREVKRVIDEIKREAERQ

SEQ ID NO: 21208 - protein, 58 aa, Artificial Sequence
  Synthetic
EEVLKLVEDVRRLVEDVDRTVERMSRESKKLAEDIKRVSEKSKRDIERLLADVERTVR

SEQ ID NO: 21209 - protein, 60 aa, Artificial Sequence
  Synthetic
DELDEVLKEVEELIKRVKRESERTLKENRDMVREIKRRSEESLREVRELIERVKDELRRT

SEQ ID NO: 21210 - protein, 58 aa, Artificial Sequence
  Synthetic
ERVARVVRRVEELLEDVERRSREVLKEMDKTAKEVKKASEKSEEDIKRLLEDVERTVR

SEQ ID NO: 21211 - protein, 60 aa, Artificial Sequence
  Synthetic
KEAEDILKEVEDIIREAKKLSERTLDENRKVIRKAKEDSRRSLEEVRKIIEDVKEELDRI

SEQ ID NO: 21212 - protein, 58 aa, Artificial Sequence
  Synthetic
ERVLRVIREIEKLLEDVKRVSERSVKEMKKTLDDVRRASKRSEEEIERLLRDVERRVT

SEQ ID NO: 21213 - protein, 60 aa, Artificial Sequence
  Synthetic
RSLEEVLKEVEELIRRAKEESKRTLDDVRKLIEEVKRESERSLRDVREMIERAKDRIRRI

SEQ ID NO: 21214 - protein, 58 aa, Artificial Sequence
  Synthetic
EEVRKVVEDVERLLRDVERMSKEVEKRIRELLDDIRRVSERSRREIERLLEDVERTAR

SEQ ID NO: 21215 - protein, 60 aa, Artificial Sequence
  Synthetic
DELEEILKRIEDRIREIKERSKKTLDDIRKVAERVEERSRESLKEVREVVEEIKDRIRRI

SEQ ID NO: 21216 - protein, 58 aa, Artificial Sequence
  Synthetic
REVLKVIRDIEELLREVAEVSERSRREIEKLLEDVERVSREAIKRIKDLLRDVERTVK

SEQ ID NO: 21217 - protein, 60 aa, Artificial Sequence
  Synthetic
KEIEELLDEIRRLMERSKENVRRSLKKSKDLIEEAKRRLEKSLEDSRELIRRIEDRIRRI

SEQ ID NO: 21218 - protein, 55 aa, Artificial Sequence
  Synthetic
KEVLEEIRRLLEDLRRMNEKSIEDSKRLLEDVARAVKRSIDESRKLLEKIERDVD

SEQ ID NO: 21219 - protein, 60 aa, Artificial Sequence
  Synthetic
KEMEDLLREAEELIRRSVENVKRSLEESEKLIRESKKNVERSLRRSEELAKEIKDEIRRI

SEQ ID NO: 21220 - protein, 55 aa, Artificial Sequence
  Synthetic
ERVLREIRRLLRELEEINEKSIRDSKRLLEEIERVNRDSIRRSKELLEDVERTVR

SEQ ID NO: 21221 - protein, 60 aa, Artificial Sequence
  Synthetic
SEVEDLLRRAEELIRRAKERLERSLRRVEKLIDDVRRKLERNNETVKRLVEEIKEKIKRI

SEQ ID NO: 21222 - protein, 55 aa, Artificial Sequence
  Synthetic
EEMLKEIERLLEDIERVVRETIDTTRRLLEKIEREVREVIKSNRELVADLERTVT

SEQ ID NO: 21223 - protein, 60 aa, Artificial Sequence
  Synthetic
DEVERLLEEVKRLIDRAREELKKSLDRVRRLVRENEEAVRKNNEDVADLIRKIKEKIEKI

SEQ ID NO: 21224 - protein, 55 aa, Artificial Sequence
  Synthetic
KKVLDDIRRLLKDIKDIVDKTIRDTKELLRDIEEKNRRATKSNKDLLEEIRETVR

SEQ ID NO: 21225 - protein, 59 aa, Artificial Sequence
  Synthetic
DEVEKLLRRVEKEVDRIKRELEDNLRRVEKLVKEIHEENEKLMRKARKLVEDIKRIIDR

SEQ ID NO: 21226 - protein, 59 aa, Artificial Sequence
  Synthetic
SEEVKKAEKEIRRLLDELRRVVEEVTKKTKELLRRLKKSSDELRKTIKELLRELEEKVR

SEQ ID NO: 21227 - protein, 59 aa, Artificial Sequence
  Synthetic
KEVDEILRELEELVKEIKKRLEELTREVKRLVDKIHKDNEDNLRDMARLVEEIKEIIRR

SEQ ID NO: 21228 - protein, 59 aa, Artificial Sequence
  Synthetic
SKEVERVERDVERLLDELRRVVKEVLDRIRRLLEELERSSKRVKEETERLVKEVREAAK

SEQ ID NO: 21229 - protein, 59 aa, Artificial Sequence
  Synthetic
SEVDKILEDLRELVERIHKKNKRIVEEDRELVKEIHRKNEENLKTMERLVEEIEKIIRR

SEQ ID NO: 21230 - protein, 59 aa, Artificial Sequence
  Synthetic
SEEVKRVRKDVDRLLKELEDSSREVKERSRRTLEELERSSREVKERTERLLRKLEKAVE

SEQ ID NO: 21231 - protein, 59 aa, Artificial Sequence
  Synthetic
DRLEEILKELRELVETIHRRNEEIVRKVAELVKRIHDHNEENTRRVEELVRRIKDIIRR

SEQ ID NO: 21232 - protein, 59 aa, Artificial Sequence
  Synthetic
SEDVERAKRDVDRLLKELEESSERVLRTIEKLLKELRESSKRVRDETKRLLDELREAVR

SEQ ID NO: 21233 - protein, 59 aa, Artificial Sequence
  Synthetic
SELDEILKRLEKLVEDIKRKLEKLVRDLERLVKRIHDHNEENLKTVKKLVDEIKDIIRR

SEQ ID NO: 21234 - protein, 59 aa, Artificial Sequence
  Synthetic
SREVDRVREDVRRLLEDLKRVAERVKRDIERLLKELKESSDEVKKRTEELLEELERAVR

SEQ ID NO: 21235 - protein, 59 aa, Artificial Sequence
  Synthetic
DEVDDILRRLRELVERIKKHLEDNLRELEELVKRIHDHNKRNVEEVKKLVEEIKKIIAD

SEQ ID NO: 21236 - protein, 59 aa, Artificial Sequence
  Synthetic
SEEVRRVKEEVERLLEEVRRVVRKVKEESKRLLEELRRSSDRVKKETERLLEELERAVK

SEQ ID NO: 21237 - protein, 59 aa, Artificial Sequence
  Synthetic
SEAEALVEEVKRIVEESKRRLEKVVEESRKLVEEVKKRLRDMLKTIEDLVKEVKELLDN

SEQ ID NO: 21238 - protein, 55 aa, Artificial Sequence
  Synthetic
EEVKRKVERLLEEDRRVLEEVKESAKRTSKEVRDELREVSKRVEKLLKDVRDAAR

SEQ ID NO: 21239 - protein, 59 aa, Artificial Sequence
  Synthetic
DEAEDLVRRVRDIVRKSREELKRVVEESDRLVEEVKRRLKKVVEDSKRLVDEVRKLREG

SEQ ID NO: 21240 - protein, 55 aa, Artificial Sequence
  Synthetic
EEVKREVERLLEDDERVLREVAKRSRETLETVRKVLEEVERRSRKTLEEVEKTAR

SEQ ID NO: 21241 - protein, 59 aa, Artificial Sequence
  Synthetic
SEMDELVDRARRIVEESRRLLEEVVKRSKDLVKDVKKKLEDALRRVEEIVRRLDEELKG

SEQ ID NO: 21242 - protein, 55 aa, Artificial Sequence
  Synthetic
EEVKDEVRKLIEEDKKVLDDVRRKSERTLREVEDVLRRVEEEVEKLLRKVEESAK

SEQ ID NO: 21243 - protein, 59 aa, Artificial Sequence
  Synthetic
DEAEKLVEDVRRIVEKIRKELEDVVEESRELVERIRRELERVVEESERLVEELRKELEK

SEQ ID NO: 21244 - protein, 55 aa, Artificial Sequence
  Synthetic
EEVKEEVKKLLEEVRDVLRKVKKASEETLRDVRRVLEEVKRRSEETLKRVREEAT

SEQ ID NO: 21245 - protein, 60 aa, Artificial Sequence
  Synthetic
SEVEDIVRDVKRLVEENHRRNEEIVRRDEDLVRRNNELNKRILEEVEELVRRLEDVARKI

SEQ ID NO: 21246 - protein, 55 aa, Artificial Sequence
  Synthetic
EEALRTAEELIKRLEDSLREVKDRSKRSLDEMKKSADDVRREIERLIKRVRDTTK

SEQ ID NO: 21247 - protein, 60 aa, Artificial Sequence
  Synthetic
SEVEKIVREVEEVVERIRKKSEDSLREVRRLVEEIKRRSEKTVEDDEKLVKDAKDELRRI

SEQ ID NO: 21248 - protein, 55 aa, Artificial Sequence
  Synthetic
EDAKRRIEELMKEVRDVSRRALKEIKDLLREVEEVSKKALKRSKDTVDEVREEVR

SEQ ID NO: 21249 - protein, 60 aa, Artificial Sequence
  Synthetic
DEVEEIVKEVARVVDEIRRLSKESLDRVRKLVEDIERELRKIVKTDRDLVEEAKRVLKDI

SEQ ID NO: 21250 - protein, 55 aa, Artificial Sequence
  Synthetic
REVEKEIRRLVEEVKEVSRKVRKEIEELMRRVEEVVKTVKEESKKTVREVEETAR

SEQ ID NO: 21251 - protein, 60 aa, Artificial Sequence
  Synthetic
DEADEIVKRVEEVVRRAKETLERILKRVEEMLDRIRKESEKTVREDEKLVEEVKDRLRKI

SEQ ID NO: 21252 - protein, 55 aa, Artificial Sequence
  Synthetic
ERLLREIKRLLKEVEDEVRRVEKAIKELVDRVKEVSDRALERSKRTVREVEERVR

SEQ ID NO: 21253 - protein, 56 aa, Artificial Sequence
  Synthetic
SEVEEVKEDSKRTLKELKDVAKKVDDDSKRLLEELERVARKSIEDSKRLLDELRER

SEQ ID NO: 21254 - protein, 59 aa, Artificial Sequence
  Synthetic
EKELRRLVEDDRRLVEEVKRDSERLLDEIRKLVEEIKERLRRSVEELRRRVEEIKKTTT

SEQ ID NO: 21255 - protein, 56 aa, Artificial Sequence
  Synthetic
SSVEKVKRDSERTLREVEKVIEKVDRDSERLLRDVERVITEADERSKDLLRRLEES

SEQ ID NO: 21256 - protein, 59 aa, Artificial Sequence
  Synthetic
DTDLRRLVEEDRKLVTRVKEESKRLLEELRRLVETVRKRSEDLLREIKKRVDEILRRTK

SEQ ID NO: 21257 - protein, 60 aa, Artificial Sequence
  Synthetic
DEIKEVIDRITKVLEDNERVVRKLSEENKKVLDDIRRRAEEIIRRNEEVLRRIKELAKRN

SEQ ID NO: 21258 - protein, 55 aa, Artificial Sequence
  Synthetic
EELKKALDDILRRLEESNRKNIEDSRRILEDVERIVRRVVEVSKDIVRKAEEDVR

SEQ ID NO: 21259 - protein, 59 aa, Artificial Sequence
  Synthetic
SEVEEVIDELRKVLEENKRRVEELSRENDDVLRRIEERLKKIEDELEKILKDVRDLKDN

SEQ ID NO: 21260 - protein, 55 aa, Artificial Sequence
  Synthetic
ERLKEEITRILEELTRINEENKRRSEEILDRVRKDVERVLKRVEDILKEIEDELR

SEQ ID NO: 21261 - protein, 60 aa, Artificial Sequence
  Synthetic
SSVEELEERLRRVLERSERHLRKLEKKVEEVLDESRKNLTRLLRDVERVLRDVEETVRRE

SEQ ID NO: 21262 - protein, 59 aa, Artificial Sequence
  Synthetic
ERKARELKRTVKRLAEESRKILREVEEKVRKVAEDSERILEEVERTVKRVVEEIDRTVR

SEQ ID NO: 21263 - protein, 60 aa, Artificial Sequence
  Synthetic
SKVEKLLRELEEVLKDSERHVREDSDRLRRVLEDSERHVRKVLRDVEKVLREVEDMVRKR

SEQ ID NO: 21264 - protein, 59 aa, Artificial Sequence
  Synthetic
EEKARRLEERVEEIVRESERTSRENNKKSRDIIKTSEDILREAADRVREVVERIRRTLT

SEQ ID NO: 21265 - protein, 60 aa, Artificial Sequence
  Synthetic
KEVEEVIERSKKSNEENERRLRKILEEARRINEENEKLLRKILEEAKRVVEEVRRILKDN

SEQ ID NO: 21266 - protein, 59 aa, Artificial Sequence
  Synthetic
KEELDKLREESKKILRHSERLLKEVEEEVKRILEHSEELLRRVEDKVRRLLKEIEDALR

SEQ ID NO: 21267 - protein, 60 aa, Artificial Sequence
  Synthetic
DEVEEVEKKVDKIDKENEDLLRKVIRDAERINEENTRLLEDILRKAKKMVDDVREILKDR

SEQ ID NO: 21268 - protein, 59 aa, Artificial Sequence
  Synthetic
EEEVRRVAERVKEVVKHSRELLKRVEDMVRRIVEHSKRLLDEVRERVKDLLRKIAEARK

SEQ ID NO: 21269 - protein, 59 aa, Artificial Sequence
  Synthetic
DEVREVVRRLEEIVRDVNKKNRESVREAERLVDRLREILEETSRRLKELVDRVKELIKG

SEQ ID NO: 21270 - protein, 59 aa, Artificial Sequence
  Synthetic
EKEARELEDAVRKLIERLKRSAEEVKKRVEELDEEIRRVVEEDRRTIKELKEEIDRADK

SEQ ID NO: 21271 - protein, 59 aa, Artificial Sequence
  Synthetic
DEVEEAVKRIEDLVERLRELLEKTSREIEKILKESEDKLRESSDRIRRLLDELKKLIEN

SEQ ID NO: 21272 - protein, 59 aa, Artificial Sequence
  Synthetic
EEKLRKAEDTVRRVIKDVRKMLEDDRRTVEEVIRRDREALEKDRKTVDDVIEDVKRVAK

SEQ ID NO: 21273 - protein, 59 aa, Artificial Sequence
  Synthetic
SEVDEAVEEIKRILEESKKRLDETSEEIKRILEDSERRLRESSKRIRELVKELKKRIDG

SEQ ID NO: 21274 - protein, 59 aa, Artificial Sequence
  Synthetic
KDKLTRIREVVDKVVKEDEDALREDERTVREVIKRDRDLLEEDRRTVEDVIRKVRETAR

SEQ ID NO: 21275 - protein, 59 aa, Artificial Sequence
  Synthetic
SDAEKVVKRIKEIVEDSTRKVRDTSRDIRRILDESRKMLEDVVREIKDLVRRLEELIRG

SEQ ID NO: 21276 - protein, 59 aa, Artificial Sequence
  Synthetic
KDTLDKVREDAERVLEEDKKVADDDRKTVEDVIREDKRLLKRVEEEVKRVIKEVDDAAK

SEQ ID NO: 21277 - protein, 59 aa, Artificial Sequence
  Synthetic
SEVDRAVETIRRILEESEKIIRKVVREIEEILDRSRRLLEKSSEEIEDLVRRLKELIEG

SEQ ID NO: 21278 - protein, 59 aa, Artificial Sequence
  Synthetic
ERLLREAEKDVRRVVEEDEKVLRDVARRVEEVIKADKKLLREDEKTVREVIERVKETAR

SEQ ID NO: 21279 - protein, 59 aa, Artificial Sequence
  Synthetic
DEFREAVRRIKEIIDDSRRKLEKNVKENEELLKRSDDELRKSSEDIKKLLEELRRLIEG

SEQ ID NO: 21280 - protein, 59 aa, Artificial Sequence
  Synthetic
EKSLREVEERVERLLEDDRRLLEENARRVEDLIRKDKEALDRDRKTVEDVKREVEKDAR

SEQ ID NO: 21281 - protein, 59 aa, Artificial Sequence
  Synthetic
SEVDEVVKRIAEIVKTSKDELREAVKRIEDIVRRSEKMVRDNLRENERLVRELDKLAKG

SEQ ID NO: 21282 - protein, 59 aa, Artificial Sequence
  Synthetic
KEKLDRVTETVRRLIEEDKRALEDVERKVEDVIRRDREVLERNRREVERLIKEIEDKRR

SEQ ID NO: 21283 - protein, 59 aa, Artificial Sequence
  Synthetic
KDAERAVEEIRKILEDSKEKMERNVRENEKLVRDSRRKLEENVERNEKLVRDLKRLKEG

SEQ ID NO: 21284 - protein, 59 aa, Artificial Sequence
  Synthetic
KDTLKRVTDEVRRVVEEDKRVLEENRRRVEKLIEEDKRALDENRERVRKLIEDIDKDAT

SEQ ID NO: 21285 - protein, 59 aa, Artificial Sequence
  Synthetic
DEVEDAVEKLKRLVDELERLLREAVRRIEKILEDSTRKVRKNLEENKELVKRLRELIKN

SEQ ID NO: 21286 - protein, 59 aa, Artificial Sequence
  Synthetic
KDLLRKVAEVVRRLEEEIRRLLEEAKRVVDEVIKKDRTVMERNREEVERLIREIEETAR

SEQ ID NO: 21287 - protein, 59 aa, Artificial Sequence
  Synthetic
SEVDEVVERIRRIIKKSKEELDKAVRDIEEILRRLEKELRDNVRENEKLVEDVRRAIEG

SEQ ID NO: 21288 - protein, 59 aa, Artificial Sequence
  Synthetic
KDKLERVSREAKRVLKEDEEALRDVEKKVTDVIEAVKKMLEDNRDRVRRLIEEIKRRAT

SEQ ID NO: 21289 - protein, 59 aa, Artificial Sequence
  Synthetic
DEIREAVKRIRRLLEESHRENKEIVDRLRKLVEESHRKNEKLKRELEELVKKLKEIIDK

SEQ ID NO: 21290 - protein, 59 aa, Artificial Sequence
  Synthetic
SEDLKRAEEEIRKVSEDNKRSVDRVREVVKRLSDENRRSLEEVREVVKRLIREVEEARR

SEQ ID NO: 21291 - protein, 59 aa, Artificial Sequence
  Synthetic
DEIRKVVKEITDLLKKSNDKNRKVVEEIRDLLRKSKKLADELVERLRKLVEDLRRRIDK

SEQ ID NO: 21292 - protein, 59 aa, Artificial Sequence
  Synthetic
SEDLKRVEERAREVSRRNEESMRRVKEDADRVSEKNKEVLDRVREEVKRLIEEVRETLR

SEQ ID NO: 21293 - protein, 59 aa, Artificial Sequence
  Synthetic
DRIRDVAREIRELLKRSNDENRKVVEEVRRLLKESNDTNKRVVDEVRELLERLKEIARR

SEQ ID NO: 21294 - protein, 59 aa, Artificial Sequence
  Synthetic
SEDLKRIRREVEKVSEDNKRSAKEVEDEARKVSEDNERSVRDVKEKADRVIKEVEDEDR

SEQ ID NO: 21295 - protein, 60 aa, Artificial Sequence
  Synthetic
DEERKIKRVLDEVDKHSKRVIAEAKRVVDEVLREVEKVVRRNKEVLDEILREVKRILDEG

SEQ ID NO: 21296 - protein, 55 aa, Artificial Sequence
  Synthetic
EELIKTIRKVNKEIEDRVRDLIKTVRDILRRIEEEVRKSIEDSKRLLRELEARAE

SEQ ID NO: 21297 - protein, 57 aa, Artificial Sequence
  Synthetic
SVVEDLKRTVEEVVKKSEEILKEDRKTVEKVVEEVKKSDKEDRDDVDRVVKEVRKRI

SEQ ID NO: 21298 - protein, 59 aa, Artificial Sequence
  Synthetic
KDLADKVKKDAEEVLKRSKEHVDRSIDRTREILKRLRETNEESIKRTRDILRKIAEEAR

SEQ ID NO: 21299 - protein, 57 aa, Artificial Sequence
  Synthetic
SVSEELKKKVEKVARDVERSLERDATEVTKVVEEVKKSDRKDEETVKRVVKRVDELI

SEQ ID NO: 21300 - protein, 59 aa, Artificial Sequence
  Synthetic
REVAEKVIRDAEKVLDDIRRMNEESIRDTRRVLEENKRKNEESIRKTEEILRRIEEESR

SEQ ID NO: 21301 - protein, 60 aa, Artificial Sequence
  Synthetic
SEVDEVLKELERINRENHREVEELLRRLERILRESKKHIKEVIEDLRRRLKELEDEVRRR

SEQ ID NO: 21302 - protein, 59 aa, Artificial Sequence
  Synthetic
EKKVRELEEEARRVKRSTEEVIKRLRDSVEKLVKDSERVLRELKKEVERVVEEIDKMIK

SEQ ID NO: 21303 - protein, 60 aa, Artificial Sequence
  Synthetic
DEVEKALEESKKSNEENHRKVKKVLESAKDINRRNHDLVRDVIRKLEEILRRIEKVVREG

SEQ ID NO: 21304 - protein, 59 aa, Artificial Sequence
  Synthetic
DKEVTELRESSRRSIESTREAVRTLEEAVREVIKSTDEAVKRLEATVKRIEEEIRKSMK

SEQ ID NO: 21305 - protein, 60 aa, Artificial Sequence
  Synthetic
DDVERVLKKSRDSNRENHEKVKRVIEKSDRSNEDNHRLVEDAIRKAEEILEEVERLVTAG

SEQ ID NO: 21306 - protein, 59 aa, Artificial Sequence
  Synthetic
KEEVDELRKSSEDSIRSTEDVVRKLEETSKRSIRSTEDVARKLEEAVRRIERRIRERTR

SEQ ID NO: 21307 - protein, 59 aa, Artificial Sequence
  Synthetic
SEVEEVLKRSKESVERVDRDVRRVLRELEDLNRKNHKRVEEVIRDAERILREVEDMVRR

SEQ ID NO: 21308 - protein, 59 aa, Artificial Sequence
  Synthetic
DKEVDELRKSSEKSVEDIKRVVDRLRDSARKIIKSTEDVVKELERRVREVIKRIKEEAT

SEQ ID NO: 21309 - protein, 58 aa, Artificial Sequence
  Synthetic
SEIEEIIKRIEKLLRDDEKKIRDSIKRSEDLLREANRENKESIDRVRELLEKVKRLRE

SEQ ID NO: 21310 - protein, 61 aa, Artificial Sequence
  Synthetic
KAEEEVRRLEKRVRDVLRELEKTLKRVTEVHKETTKENEKSARRVKREVEKVIEEVERTRT

SEQ ID NO: 21311 - protein, 58 aa, Artificial Sequence
  Synthetic
SEIEEIIRRIEELEERLKRELDRSIRTSEKLLEDAREINKESIRRVEKLLEEIRRVVD

SEQ ID NO: 21312 - protein, 61 aa, Artificial Sequence
  Synthetic
KAEERVRALEKAVKDVLESLKRLLDEVRKRHKESSEDNERSLKRSKEEAEKVIKAVEDERR

SEQ ID NO: 21313 - protein, 60 aa, Artificial Sequence
  Synthetic
SEIEDIIRRIRKLLEEDKEKIERSIRESRRLLEEAKRINEKSIEDVKRLLREIEDVVDKI

SEQ ID NO: 21314 - protein, 59 aa, Artificial Sequence
  Synthetic
REKVERLREDVDRVRKELEKTLETVTRSHKRSSEENKRSLEESERTARKVIEDIRRRDR

SEQ ID NO: 21315 - protein, 60 aa, Artificial Sequence
  Synthetic
KDIEEVLKRIKDLLEDIRRRLKESEERSRKLLEEAREINERSIERVRRLLEEIRRLKEEI

SEQ ID NO: 21316 - protein, 62 aa, Artificial Sequence
  Synthetic
EEMERKVRELERAVREVIKEVEKLLTDVARKHKKVSRDNKESLRRSEEEARRVIRAVEETDR

SEQ ID NO: 21317 - protein, 57 aa, Artificial Sequence
  Synthetic
STLETVEKKVEEVIRENEKSMRESEEKVDRSTKRIEDVLRRLEETIRKTSDDIAKDV

SEQ ID NO: 21318 - protein, 59 aa, Artificial Sequence
  Synthetic
REDATRVIEEAKRILDEARKLNEETIRRSEELVRRIERVIEEIIKRSEKLLEDVRRESK

SEQ ID NO: 21319 - protein, 57 aa, Artificial Sequence
  Synthetic
SVLDDVRKKVEEVLDRNRELADRSRRTVEEVLRENERVMEESKRTVDEVIKRVAEKL

SEQ ID NO: 21320 - protein, 59 aa, Artificial Sequence
  Synthetic
REDAERMIERLKRILDRVEEENRRAIEELREVLERVRDDNRRTIEELERILKRVEEESR

SEQ ID NO: 21321 - protein, 57 aa, Artificial Sequence
  Synthetic
STVETVREEVERVLKHSDDLIKEVEDVNRRVEEEIKRVIRELEEENERLVREVRKKV

SEQ ID NO: 21322 - protein, 59 aa, Artificial Sequence
  Synthetic
EEEAREIIKRLREVNKRTKEKLDELIKHSEEVLERVKRLIDELRKHSEEVLEDLRRRAK

SEQ ID NO: 21323 - protein, 57 aa, Artificial Sequence
  Synthetic
DEVERVAKEVEDVLREVEKLIRDVRRKVEEVLKHSEEVAKRVRDTNRELVKEVERDI

SEQ ID NO: 21324 - protein, 59 aa, Artificial Sequence
  Synthetic
EKELRDIIRRLKEVLDKLKKDLEDIIRRLEEVNRESERLAREAIRHSEEVLDKLRKDSK

SEQ ID NO: 21325 - protein, 60 aa, Artificial Sequence
  Synthetic
REVEEVKKRIREALEESERVIRENKKKNEELLDRVRKEIERNKKKNEEVLKRAKEVTKAG

SEQ ID NO: 21326 - protein, 55 aa, Artificial Sequence
  Synthetic
EDVKRKIDRMVEESRKLVEDLKRESDRVEEEVRKLVKTIKDEITRSLDEVRKDAE

SEQ ID NO: 21327 - protein, 60 aa, Artificial Sequence
  Synthetic
SEVDEVRKDIERILRKSERDIRRNKEENKRLLDEVRRRIEENRKENEDLLKRIEELRRAG

SEQ ID NO: 21328 - protein, 55 aa, Artificial Sequence
  Synthetic
EEVKKEIDKAVEDSKRLVEDAERVSDEVRERVRRLVERLKEESDRVEREVEKRTT

SEQ ID NO: 21329 - protein, 60 aa, Artificial Sequence
  Synthetic
SEVEEVLRRAEKLSEDNKRENDESLERLRRIVEKVREENEESVKTLEKILKEVEEVVRRN

SEQ ID NO: 21330 - protein, 59 aa, Artificial Sequence
  Synthetic
KEVIKRLEDEVRRLEEDNKRSIKKSEDEIRKLVERLKRSAERSDEVIRKLEKDAEDLIR

SEQ ID NO: 21331 - protein, 59 aa, Artificial Sequence
  Synthetic
DEVERILEDSKRLVDELRERVERVIEESKRLLDDLRRKVEEVVRRLEKIVEDLKRMIEG

SEQ ID NO: 21332 - protein, 59 aa, Artificial Sequence
  Synthetic
EDKVRELKETADRSNEEIKRVLEKIKRMIEDTNRKIKKLLEEIRDVARRVLEEVREVAR

SEQ ID NO: 21333 - protein, 59 aa, Artificial Sequence
  Synthetic
KEVEDVLRESKRLVEDLERRSERSIEESKRLLKELEDLVEEVIRRSEESIDRLRELIKG

SEQ ID NO: 21334 - protein, 59 aa, Artificial Sequence
  Synthetic
EKKVRDAEREARDSNDKIRRSLEKVERVVRETNRRIKELLEKIERVIRDTDRKIAEEAK

SEQ ID NO: 21335 - protein, 59 aa, Artificial Sequence
  Synthetic
SEVEKIVRDSEKLLEDLKRELEKVIKDSDDLVRELKKRVTEVLERLRRIVEELRKLIEG

SEQ ID NO: 21336 - protein, 59 aa, Artificial Sequence
  Synthetic
EEKVRRLEKEARRTNEEIRKLLEKVDEVARRSNERIKAVLEEIKREIEKLKREVEKDAK

SEQ ID NO: 21337 - protein, 59 aa, Artificial Sequence
  Synthetic
SEIEEVLKKSKKLVDDLRKEVEETIRESKKTVDDLDKEIKEVVRRSEESLDRLKKLIDG

SEQ ID NO: 21338 - protein, 59 aa, Artificial Sequence
  Synthetic
ERKVDEIRRAVEETNEEIKRVVDEDNKAVKRSLEEIERVAEEIKRVAEETLKAIEDARR

SEQ ID NO: 21339 - protein, 59 aa, Artificial Sequence
  Synthetic
DEVEELVRRLEELVKRSRDTNRKIIKEIRELSERLKRELEKIARELEKLVEDLKEEVKR

SEQ ID NO: 21340 - protein, 56 aa, Artificial Sequence
  Synthetic
VEKIEDVVRRLLEENERVLRRTEEEARRVLETNRDLLRKIREVVDRLEKEIREAEK

SEQ ID NO: 21341 - protein, 58 aa, Artificial Sequence
  Synthetic
SDADRVAEELKKLVEDSRRENERVIEESKRLVKENEDRNRELIERLKKLVDKLRDILE

SEQ ID NO: 21342 - protein, 56 aa, Artificial Sequence
  Synthetic
VDKVRETVKRLLEENKRVMEKTEEVAKKSSEDIKRVADETRRRAEELLKEVDELRK

SEQ ID NO: 21343 - protein, 59 aa, Artificial Sequence
  Synthetic
SEADEMLRRLKELVDRSRDTNRKILKRSEDLVRDSKKKNDDIIRELRRLLEELRELARR

SEQ ID NO: 21344 - protein, 56 aa, Artificial Sequence
  Synthetic
TDDVRREVERLLRDNKRVLDETRKAAEESTRRNKKVLEESREVVKDVLKKIEDTDR

SEQ ID NO: 21345 - protein, 59 aa, Artificial Sequence
  Synthetic
DEVREVAERLRRLVDESRKRNEEVIKESEALVDRVRKTNEEVMKRLRELIDKLEKDIRR

SEQ ID NO: 21346 - protein, 56 aa, Artificial Sequence
  Synthetic
VETIERVVRELLEENKEVLRKTEEMVKRSTETNKRLLERSKEVADRLRERIKEAAK

SEQ ID NO: 21347 - protein, 59 aa, Artificial Sequence
  Synthetic
DEVDELLKRLRKLVDEVRKENDKMVKESKRLVEDLKRKIDEIIERIERLLEELEKILKD

SEQ ID NO: 21348 - protein, 56 aa, Artificial Sequence
  Synthetic
VEDIEREAERLLRENEELLRRSEEVIRRSTEKIKKVLRDAEERAREILKRVEDAAK

SEQ ID NO: 21349 - protein, 60 aa, Artificial Sequence
  Synthetic
DEVEEVKKKLREIVKRDRDLIERVREELKEILDRNREINRRAIEDLKRILEEVDELVKRG

SEQ ID NO: 21350 - protein, 59 aa, Artificial Sequence
  Synthetic
EELIRDVERVVREVLRRIEKSIRDLDRVIRDVLDKSRELIKRSEDVAKRVVDTLREKAR

SEQ ID NO: 21351 - protein, 61 aa, Artificial Sequence
  Synthetic
DEVETVKKELKELADEVKERNERSIRDSERLLEEVKRRNEKSIRDLERLVEELEDVLRKRG

SEQ ID NO: 21352 - protein, 59 aa, Artificial Sequence
  Synthetic
EKKVKEVTDEVKKVLDEIRELDKRSRDAVRRTNEEIKRLDKESKDVVDRVKKKVEDAVR

SEQ ID NO: 21353 - protein, 61 aa, Artificial Sequence
  Synthetic
REVEEIIERLKKLLKEIAERNTESIKELEELVRRIAEDNKRIIEELRRLLEELADVVRKKG

SEQ ID NO: 21354 - protein, 59 aa, Artificial Sequence
  Synthetic
EKKVREVRKVAEEVLRAIEELDKRSRDAVRRVTKRVKDLDEETKRVVEDVLRRIEELMK

SEQ ID NO: 21355 - protein, 61 aa, Artificial Sequence
  Synthetic
SRVEEIIEDLRRLLEEIRKENEDSIRRSKELLDRVKEINDTIIKELERLLKDIEKEVREKG

SEQ ID NO: 21356 - protein, 59 aa, Artificial Sequence
  Synthetic
EDKVRKVREVAEKVLRDIDKLDRESKEAFRRTNEEIRKLDEDTRRVAERVKKAIEDLAK

SEQ ID NO: 21357 - protein, 61 aa, Artificial Sequence
  Synthetic
SEVEEIIRRLEELVREVAKRNEDIIKRSRDLIRKVKEDNRRSEEELRDLSRRIADIVRKKG

SEQ ID NO: 21358 - protein, 59 aa, Artificial Sequence
  Synthetic
ERKVREVRRVAKKVLEDVKTLDDKTREVARRTNEDIKRLDEKSRKVIEEVRREIEELKR

SEQ ID NO: 21359 - protein, 61 aa, Artificial Sequence
  Synthetic
SEVDEIIKELERLLREIARENERIIRESRKLADEVRKRNEDAIRKLEELVRRLADMVRRKG

SEQ ID NO: 21360 - protein, 59 aa, Artificial Sequence
  Synthetic
KDKVTKVKKVADDVLREIKKLDDETRRVIEDTNKKIKDLDKKTRDVVRKVLEEVKKLEK

SEQ ID NO: 21361 - protein, 61 aa, Artificial Sequence
  Synthetic
SDVEDVIRKLETLVDDLRRKVERIKERSRELIKRIAEENRKVIEELERLLEELADVVRRKG

SEQ ID NO: 21362 - protein, 59 aa, Artificial Sequence
  Synthetic
EKKVRDVRRVAEKVLREVRRLMEEVERVARKTNRDIERLDEETRRVVEKVRKEIEDLRR

SEQ ID NO: 21363 - protein, 57 aa, Artificial Sequence
  Synthetic
SAKDKIAEVAKRVLTENKKLLEESEEVARRTSEESKRLLKESEDVVRRVLDEIRREI

SEQ ID NO: 21364 - protein, 59 aa, Artificial Sequence
  Synthetic
ERLIEEVIRRLEELLKEVKKKNEEVIRRSKELIDRDRDLNRRSIEELERLIREVRKESK

SEQ ID NO: 21365 - protein, 57 aa, Artificial Sequence
  Synthetic
SAKEKIKEVAERVEKRNKELLEESERVIKEVSERSERLLDESRKVVKRSTEEIRDKI

SEQ ID NO: 21366 - protein, 59 aa, Artificial Sequence
  Synthetic
EELIREVIERLKELVDRVEKENRKAIETSRRLLKEDEDLNRESIKRSEELVKDVRRRST

SEQ ID NO: 21367 - protein, 57 aa, Artificial Sequence
  Synthetic
DARKELEEVVRRVEEEIRRLLKDIEDVAREVNRRSEKLLRETEEVIRRSTEEIKRDV

SEQ ID NO: 21368 - protein, 59 aa, Artificial Sequence
  Synthetic
RERVKEIIERLRRLVEELKKLVDEVRKRLEDVVRELKERNKKVIDDSKDLVRRAREESR

SEQ ID NO: 21369 - protein, 59 aa, Artificial Sequence
  Synthetic
DFSERLDEVLRKVRTDIKKLVEKVRRVVEDSRRRVEKLVEDVRRSSEEVLKTVKELLDR

SEQ ID NO: 21370 - protein, 59 aa, Artificial Sequence
  Synthetic
DEVVRRLEKRLRDALKEAEDKVRRDEERNREVLERLEKIVRDLHRENEKAVEDVADRAR

SEQ ID NO: 21371 - protein, 59 aa, Artificial Sequence
  Synthetic
DLSEEVKRVIEEVRKRIEELVDEVRKSTEEVIKRVRRLVEEVERVVEDSRRKVDKLLKE

SEQ ID NO: 21372 - protein, 59 aa, Artificial Sequence
  Synthetic
EEVVRRLKEELEKALRDAERIVKELHEENRKVLEDVKRMVDEDKKKNERVVDEVRRDAK

SEQ ID NO: 21373 - protein, 60 aa, Artificial Sequence
  Synthetic
SLSEEVKKVIREVEEDVKRLVRELRESSERVLKEIKKLVDEVRRVLEESKERVKKLEREG

SEQ ID NO: 21374 - protein, 59 aa, Artificial Sequence
  Synthetic
DEVVRRLKKRLKEALDRLRDIARKLDKENKEALDEARRIVEENKRRNEKVVEDVERRAE

SEQ ID NO: 21375 - protein, 60 aa, Artificial Sequence
  Synthetic
DEVEELKKDLKRVLEEVRKIVEDIHRTNEEVLREVEKIVEDIHRENKEVLEKVEKIMREL

SEQ ID NO: 21376 - protein, 59 aa, Artificial Sequence
  Synthetic
EELVREVKRVVDELEKEVRDLLRRLKESTDKLREDVRRLAERLRDSLREMERDVREKTR

SEQ ID NO: 21377 - protein, 60 aa, Artificial Sequence
  Synthetic
DEVERLKRELETVLRDVERIVEEIHRENKKNLDKVKKIVEEIHKENREVLEKVRKIMEEL

SEQ ID NO: 21378 - protein, 59 aa, Artificial Sequence
  Synthetic
KKLVEEVEEVVKRVEEAVEELARRLEKSTRDVVEESKKLARELEKSLEEVKEEVRKLIT

SEQ ID NO: 21379 - protein, 60 aa, Artificial Sequence
  Synthetic
KELEELIKRLKRVLEENRDIVRKIHEDNERNLDELRKIVERIHKENKRVLEEVKKIFEEL

SEQ ID NO: 21380 - protein, 59 aa, Artificial Sequence
  Synthetic
ERVVREVERVIKKLEDDSRKTVRDLEESTKEVEKRSKELADELEKSIEDLERRVDEDTK

SEQ ID NO: 21381 - protein, 60 aa, Artificial Sequence
  Synthetic
REVEELKKELERVLKKVADLVEENERRNRKNLEDLRRIAEEIHRRNEEVVKRVRDTLERL

SEQ ID NO: 21382 - protein, 59 aa, Artificial Sequence
  Synthetic
EKLVRDVERVVEKVERDVKRLADRVREVLKESSDRSRELVERLRESLRKAREEVRKAIE

SEQ ID NO: 21383 - protein, 59 aa, Artificial Sequence
  Synthetic
KDVDEVLKRLRELIDELRKTNERVKRELKKLVEDLERKNKDVERRLRELIRTLEEIARK

SEQ ID NO: 21384 - protein, 59 aa, Artificial Sequence
  Synthetic
KDMVKKVRDVIEDLKREVERLDRETKEVVERVKRKIEKTNRDSKKVIDDLRREVERLRK

SEQ ID NO: 21385 - protein, 59 aa, Artificial Sequence
  Synthetic
SEAERIVEELRKLIEDLRRKNEEVKERLKRLVREDEKRNEEVLKELEDRADELRKLVEK

SEQ ID NO: 21386 - protein, 59 aa, Artificial Sequence
  Synthetic
KDVVDRLRRVIEDLKRTVEKSNEDSDRVIKEVKKRIDDSLKRVEDVIRRVKETIDRLEK

SEQ ID NO: 21387 - protein, 59 aa, Artificial Sequence
  Synthetic
SDVDRVAKDLEKLIRDLEKINRDVSRENKELIEKDKKINEDVLRELDRLVEELERLVRE

SEQ ID NO: 21388 - protein, 59 aa, Artificial Sequence
  Synthetic
KEMLEKIRKVAERLRREVERSNEESKKSADEAEKTIRKSLKEVEERIREVEKKIRDLKR

SEQ ID NO: 21389 - protein, 59 aa, Artificial Sequence
  Synthetic
SEVDRVLKELDELIRTLEELNKKVSRENRELIKEDKKRNDEVVKRLEDLIRELKERVDK

SEQ ID NO: 21390 - protein, 59 aa, Artificial Sequence
  Synthetic
KDALKKVREVIERLKEEVERLDRETKKSADEAKEAIKRSLEEVEDVVRKIREKIKKAEE

SEQ ID NO: 21391 - protein, 59 aa, Artificial Sequence
  Synthetic
DEVERAKEELEKLVRKDEEDNDRVRKRLEELIRRLKEENDRVLEELRRLSEELDRLAKE

SEQ ID NO: 21392 - protein, 59 aa, Artificial Sequence
  Synthetic
KEALDEVRRVIEEVKREIERSLRESREVIKELKERVKELDERTREVVRKVKEEIDELER

SEQ ID NO: 21393 - protein, 59 aa, Artificial Sequence
  Synthetic
SEVDDVLRRLDKLVKDDKRTNDRIVTRDRETVKRVKEVNREIVERLERLVDRVREIVER

SEQ ID NO: 21394 - protein, 59 aa, Artificial Sequence
  Synthetic
EDALRKVREVIRRVEEDIKRSLRDSERVIEEVVTRNEKVDRETKKVVDEAKREIDERAK

SEQ ID NO: 21395 - protein, 60 aa, Artificial Sequence
  Synthetic
SELEKLIEELERVLKRIEEVSRELDKELETVLDEIRRASKRLNDELRRALEEIARAATEN

SEQ ID NO: 21396 - protein, 58 aa, Artificial Sequence
  Synthetic
KLLERAEDVIRRVREALEELVRTNRESLERVERAARELNRRNEESLERARREVEKLRR

SEQ ID NO: 21397 - protein, 60 aa, Artificial Sequence
  Synthetic
DEVRELIDRLRKALEEITRESRRLDEELRKVLEEVERRVEELSRRNKEMLDRVREKVTRR

SEQ ID NO: 21398 - protein, 59 aa, Artificial Sequence
  Synthetic
SRLLEELKRVIDEVRREVERLNKKNKESLDRARRRVEDLLRRLEESVRRVEEELKKLST

SEQ ID NO: 21399 - protein, 59 aa, Artificial Sequence
  Synthetic
SELERVIRESERTVEESHKHVREVIRKLRDIVRRSHEHVREVIERSKESVERVRDLVRR

SEQ ID NO: 21400 - protein, 59 aa, Artificial Sequence
  Synthetic
EELVRRLKKVLDESEKAVTRNIEEIKKVLEDVVRKAEKNIREIAEVLERSTRAAKKDTD

SEQ ID NO: 21401 - protein, 60 aa, Artificial Sequence
  Synthetic
ELEKRIDEVLKRVEDEIRKSIRENEEVLKDVERAVKELIKENERVLEEVREEVRKIIERV

SEQ ID NO: 21402 - protein, 59 aa, Artificial Sequence
  Synthetic
EDIVREVEKELEDILRDNRRLVRESIESLKDVVRRVAELVERSIRELKKMVDEIRKEAE

SEQ ID NO: 21403 - protein, 60 aa, Artificial Sequence
  Synthetic
KLEERIEKVLEDAERDVRRSEEEIRRVLKEVEDRVRRLLRENEDALRRVEEEVKKIIDRV

SEQ ID NO: 21404 - protein, 59 aa, Artificial Sequence
  Synthetic
EKIVKRVIETLRELLKENRKLVKDVIEDLKRIVKEVEELVRESIERLKDMVRRISEKAK

SEQ ID NO: 21405 - protein, 59 aa, Artificial Sequence
  Synthetic
KEVEEIIETLKRLSEDLERKVREIIERLKRLSERLERENKEVIKELERLIDELRKLVED

SEQ ID NO: 21406 - protein, 59 aa, Artificial Sequence
  Synthetic
SEDLRKLDRVVKESERTIRDLLRKLDEVAKRSDDTIERVNDETAKVIERVKRKIEELEK

SEQ ID NO: 21407 - protein, 59 aa, Artificial Sequence
  Synthetic
REVEEMIKELEELLKDLKEKNERASKRNRELVRRLEEENKRVIEELKKLVKELEDLVRS

SEQ ID NO: 21408 - protein, 59 aa, Artificial Sequence
  Synthetic
SEKLKELRDVIKEVKKRIDELDEYTRESIRRAKKEIERLNRETKKVIEEVVKRIEEERK

SEQ ID NO: 21409 - protein, 56 aa, Artificial Sequence
  Synthetic
SEKEEVRRVIEELRRILKRVLEDLRRVVKENEDRLRELKKENEKSLRELEERARRI

SEQ ID NO: 21410 - protein, 56 aa, Artificial Sequence
  Synthetic
VEDLKREIDRVAKEVEEVLEENRRRNEKSVEELRRDSKRNHERNEEVVKEAEDAAR

SEQ ID NO: 21411 - protein, 56 aa, Artificial Sequence
  Synthetic
SEEERVRKALEELKRELDKVHENNKRSLRENEETLKKLLEDNERSLRELEEEMRRV

SEQ ID NO: 21412 - protein, 56 aa, Artificial Sequence
  Synthetic
VEELIKTLRRVAKEVRERSEENDRRNKKSVDELREDSKRNHDENDKVLKKLEKAAE

SEQ ID NO: 21413 - protein, 56 aa, Artificial Sequence
  Synthetic
DEVEKLEEDSERSLEELRKTVEEVKKRSEDSLRDLERKSRENEKESRRTLRELREK

SEQ ID NO: 21414 - protein, 59 aa, Artificial Sequence
  Synthetic
ERVRKRVKDAAEKSRRVIEDLLREIKRVADDSRREAKRLLDRNKEVLERSKETADREKK

SEQ ID NO: 21415 - protein, 56 aa, Artificial Sequence
  Synthetic
DEVEKLAEDSKRSLEKLRREVEKVKRESRESLKRLKEESEKNVRDLRRLLEELRRR

SEQ ID NO: 21416 - protein, 59 aa, Artificial Sequence
  Synthetic
ERLLKRVKDVMDESRKVIRELLELIKEVIRESKETVKRLLDENKRVADEVRKVVDELRK

SEQ ID NO: 21417 - protein, 60 aa, Artificial Sequence
  Synthetic
SEVEEVEREVKEVIEELDEIVKRVKEENDDSVRKSKRSLDEIEAEVRRVLKELTDRVTKR

SEQ ID NO: 21418 - protein, 59 aa, Artificial Sequence
  Synthetic
EEVLERLTRLIEKLKDVIRRLRERLKKSADDSRDVIRRTLEAIKEIIERLKEVIDRLDK

SEQ ID NO: 21419 - protein, 60 aa, Artificial Sequence
  Synthetic
DEIEKLREDVKKTLEESRKSVEDLERRSEDSIRRSRESVERLKREVKEVIDRLRDARRRG

SEQ ID NO: 21420 - protein, 59 aa, Artificial Sequence
  Synthetic
KRVLDEIKKLADEDNKTVTDSLKRIRDSAKKVDEVVRESLERIRKVAEEITKVVEDVKR

SEQ ID NO: 21421 - protein, 59 aa, Artificial Sequence
  Synthetic
SELETLEKSLRDVLKESRDSVEKLRKEVEDTIKESEDSVTKLLKEIEDVIRRLEDLRRR

SEQ ID NO: 21422 - protein, 59 aa, Artificial Sequence
  Synthetic
EDVLRRIRRAAEEVRKVAKESVDRIRDLAARDNEVVERSLKKIEEVLRRIKKVADDVAR

SEQ ID NO: 21423 - protein, 60 aa, Artificial Sequence
  Synthetic
SEIERLEREVREVIKESEESVRRLKKRVDDTVRENEELVKRLEDRVRRMKERLEDARRRG

SEQ ID NO: 21424 - protein, 59 aa, Artificial Sequence
  Synthetic
DDVKRKIRKVMEEIKKRADDSRRKIEDVARKDNKAVERSLRRIERLLEEITRVVEEIKK

SEQ ID NO: 21425 - protein, 60 aa, Artificial Sequence
  Synthetic
SELEKLDKESRDSIRKSEDSVRRLEEESEESIERSKRLVEELKRLADEVIRRLEDMARRG

SEQ ID NO: 21426 - protein, 59 aa, Artificial Sequence
  Synthetic
EDVLRAIEESMKRARKAVEDSLRRIRESLEKVKEEVRRSNEKIKKIVKEVREVVERIAD

SEQ ID NO: 21427 - protein, 60 aa, Artificial Sequence
  Synthetic
DELEDLEREVREVIEESKRLLEELEKRVKEVIKTSRDSVRRLKERVDRVIKELRDAKRRG

SEQ ID NO: 21428 - protein, 59 aa, Artificial Sequence
  Synthetic
EDVLRKIRELLEEIRRVIEETNRRIKKLLEEIKRVADDSRRRIRKVAREVEEEAKEIEK

SEQ ID NO: 21429 - protein, 60 aa, Artificial Sequence
  Synthetic
SVRERIDELEKKIKRVVEKVLKENKDSLKRVEERVRRLLEENKRSLDEVREAVERVLSEV

SEQ ID NO: 21430 - protein, 56 aa, Artificial Sequence
  Synthetic
VEKLERDVEKVIEDARRTSEEVKRENDKALKDLDRLSEEVEKENRKALEDLKRTSD

SEQ ID NO: 21431 - protein, 60 aa, Artificial Sequence
  Synthetic
SVRETIDKALKKIRDVAEDLKRRNDELLKEIEEVARDSSEKIRRALEEVERRVREVLKRV

SEQ ID NO: 21432 - protein, 56 aa, Artificial Sequence
  Synthetic
VEKLKKDIERIIRELEELSDRLKKIIEEVIKKSEDLVRRLRESLERVLREIDKTTK

SEQ ID NO: 21433 - protein, 60 aa, Artificial Sequence
  Synthetic
SVREEIDRILREIEEVVKTSSERIKRLLEKIEEVVKRLIEENRRVLKRTDEEADRLLKEV

SEQ ID NO: 21434 - protein, 56 aa, Artificial Sequence
  Synthetic
VDTLRKEVKEVIDTSEDLVRRLEEEVRKAAKRLKDLVDDSRRLNTEILRTLRERRR

SEQ ID NO: 21435 - protein, 60 aa, Artificial Sequence
  Synthetic
DDLKRLEEDVRRIIEENDRIVKDIAEKSKKSIEDNRRLLKRLRDESERTIDDIRRLKEEG

SEQ ID NO: 21436 - protein, 55 aa, Artificial Sequence
  Synthetic
EEIRRLLKEITDVVRESNRRIKRINETAHEVVRRSNTETTKVNKKAHDVVEEVKR

SEQ ID NO: 21437 - protein, 60 aa, Artificial Sequence
  Synthetic
SLIEKIREIVKEIIKRSDDSVEEVKRRNEESIRRSEESVKDNRRRIEDIIRKLKRLKEEG

SEQ ID NO: 21438 - protein, 59 aa, Artificial Sequence
  Synthetic
DDMLRKIEALAREVTEVSKRALEEIRKLMEESTEVSKRALERIEASVEEVRRVAEEVKR

SEQ ID NO: 21439 - protein, 59 aa, Artificial Sequence
  Synthetic
SLLEEIEKEVREIIKRSRKSLEEVKRRNDDSIRKSEKLVEDNKREIEEVKERARKLKED

SEQ ID NO: 21440 - protein, 59 aa, Artificial Sequence
  Synthetic
KRVLEEIDRLAKDVKRVSDEVLEEIKRLAKESKEMADRSNEEIKKSVEEVRRVVEEVEK

SEQ ID NO: 21441 - protein, 59 aa, Artificial Sequence
  Synthetic
DEIEELEKLIRKAIKDSRDLVRKLEEENKRSIDTSRELLKELERMLDEVRRRLEDLKRK

SEQ ID NO: 21442 - protein, 59 aa, Artificial Sequence
  Synthetic
EELLREIKKLLDTIRRVIEESSERIKKLAEDSREVVKESSTEIKRLLETITEVVDRVTK

SEQ ID NO: 21443 - protein, 59 aa, Artificial Sequence
  Synthetic
DEVEEAEKLIRKVIKDSEKLLRDLADLNRKSIRRSEKLVEDDRRANEDVIRKLEELRRN

SEQ ID NO: 21444 - protein, 59 aa, Artificial Sequence
  Synthetic
EELLRRIKKLLDEIKKAIEDSSREIKRLLEESERVAKRSSEDIKRTLDDTRRVVEEVRR

SEQ ID NO: 21445 - protein, 60 aa, Artificial Sequence
  Synthetic
DVEETVRKLIEDVKRVMERVRKSNTDLIRRSKEVLKDARRLHEELTKEVKDVLRRLEEEV

SEQ ID NO: 21446 - protein, 59 aa, Artificial Sequence
  Synthetic
REVVKRVEEDVRKKLEESTKDSKRVERESEENLRRAKEKSKRVLKKLKDDLRRLEEESR

SEQ ID NO: 21447 - protein, 60 aa, Artificial Sequence
  Synthetic
SVKETVKDLEREVREVLKKLRDDVRKLIEESDKALKRLKKIHDDLSRDVRRVLEDLRRRV

SEQ ID NO: 21448 - protein, 59 aa, Artificial Sequence
  Synthetic
KKMIDDVVRRVRKKLKEIDEKVKDVERKSRENLKRLKEKSDRVAEDLKKILDELREEVR

SEQ ID NO: 21449 - protein, 60 aa, Artificial Sequence
  Synthetic
SVEETITELIKEVRKVAEEVKKSNKEVIEESEEALKELERTHTELSEEVRKVLRELEEEV

SEQ ID NO: 21450 - protein, 59 aa, Artificial Sequence
  Synthetic
KEVVTEVVKEVKKRLEESKDDSRRVMEESRRNLKKLREESKRVVEELRRELRRLKEEVR

SEQ ID NO: 21451 - protein, 60 aa, Artificial Sequence
  Synthetic
DVEETVRKLIEKVKRVLERLEEEHKRLSDDSRRVVKKLKDDVEDLIRRVEEVLKELERRV

SEQ ID NO: 21452 - protein, 59 aa, Artificial Sequence
  Synthetic
RKAVDEVRKEVDRRLEELKRDSERVVKKSEENLRRLEEEVRKVEEKVRRTLKRLKEEAK

SEQ ID NO: 21453 - protein, 60 aa, Artificial Sequence
  Synthetic
DKLEKVLEEIKRRLEENERLLRKVERDLKRLSKENEDRLRKMLEDLRKLSEDLLRSVEKD

SEQ ID NO: 21454 - protein, 55 aa, Artificial Sequence
  Synthetic
EKVDELLKEVEEIIDRSRKEIDRTRKDNERSVKRSEDAIRKTLDENEKSLREATR

SEQ ID NO: 21455 - protein, 60 aa, Artificial Sequence
  Synthetic
SDVEEMEKRIRDRLRENRRIVEDVAKKLRDLSRRLEEEVKKVAEELRRLSDELRKRVTRR

SEQ ID NO: 21456 - protein, 55 aa, Artificial Sequence
  Synthetic
ERVKDLLREVKRVIDESKKTIRDTLEENEDSIRRLRERIDETLKENEKSIKELKD

SEQ ID NO: 21457 - protein, 60 aa, Artificial Sequence
  Synthetic
SSVEEVKKELDKILEELKEKSERSKEEVERVLKKLREKSDRVEREVRKAEERLRRKVKDI

SEQ ID NO: 21458 - protein, 56 aa, Artificial Sequence
  Synthetic
DETVERLLKKLKDVLEELRRRHEEVSKRLEKVLKELVDRHKKVTEDLKRVLDELRK

SEQ ID NO: 21459 - protein, 60 aa, Artificial Sequence
  Synthetic
SLEETLKKLIEEVEEVLRRSEEIAREAIRRSERVLEELERRHKKVTDEIKEMLRELRERI

SEQ ID NO: 21460 - protein, 59 aa, Artificial Sequence
  Synthetic
EELVERVLDKVRRDLEDSRRHLEEVKRKSEESLKKLKKETKDALDTIREKLKRIADELR

SEQ ID NO: 21461 - protein, 60 aa, Artificial Sequence
  Synthetic
SMEEKVKRIIKKVDDVLKDSERRITELIKKSRDVLRELEKRHEELTKRVKDVLDDLRRKI

SEQ ID NO: 21462 - protein, 59 aa, Artificial Sequence
  Synthetic
DRAVDTVRKEVEKALEENRKTVRDVEEESDRSLRRLREKTDEVRRRVEEILKRLKERVD

SEQ ID NO: 21463 - protein, 60 aa, Artificial Sequence
  Synthetic
ELEERIKELIKKVRDVLRKSKEEVDKVIRKSEEVVRETEKLVEDIIRRVEKVLDEVRKRI

SEQ ID NO: 21464 - protein, 59 aa, Artificial Sequence
  Synthetic
KELVRTLERRVEEVLRRNEELVKRVREESDRSIDRSRRSLERAEEDVDRVLKEVKDRTT

SEQ ID NO: 21465 - protein, 60 aa, Artificial Sequence
  Synthetic
DLEKKVEDVIREVEKVLRELRRRHEELTKRSEDAVKETKDRVKEIEDEVRRVVDKVRKDI

SEQ ID NO: 21466 - protein, 59 aa, Artificial Sequence
  Synthetic
DELVKELKRDVERVLKRLKERSDEVRKESEKSIKKSKDSLEKAEREVREMLRDLDRETK

SEQ ID NO: 21467 - protein, 60 aa, Artificial Sequence
  Synthetic
SMEERVKELIRRVRKVLEDTERRAKEIIEDVERVLEELKKRHEDLTRKVDKVLKELKKEI

SEQ ID NO: 21468 - protein, 59 aa, Artificial Sequence
  Synthetic
EKLVTKVEEDAERALRESEESLRKVEREVKRVLEELKRKTEKVARELDKILKELKDRTR

SEQ ID NO: 21469 - protein, 60 aa, Artificial Sequence
  Synthetic
SLEDELRKLIEDVKRVAKETEDRVREILKRSKDVLDELKKEHDKLTREVERVLDELAKEI

SEQ ID NO: 21470 - protein, 59 aa, Artificial Sequence
  Synthetic
EELVKKVKKEVEDVLRRSKESLKKAEEDSRKSLEELKKKTEDLKREVKEILDRLKERVR

SEQ ID NO: 21471 - protein, 60 aa, Artificial Sequence
  Synthetic
SELEKLKREVDEVLKRNKELVDELRKRVRKALEESRRSVEEVERRVEEVLKRLEDDLRRE

SEQ ID NO: 21472 - protein, 59 aa, Artificial Sequence
  Synthetic
EELKEKVRRILKEVRRVLDESRRDVERVLREVEKVMRESIKKARDAIRKVEEVLRELER

SEQ ID NO: 21473 - protein, 60 aa, Artificial Sequence
  Synthetic
RELDDARRKVEEVLKTNKDLVDKIRKEVEETLERLDRSSRKVREIVRRVLEELTRRATER

SEQ ID NO: 21474 - protein, 59 aa, Artificial Sequence
  Synthetic
EELKRLVEKLIKEVEDVLEESRKAVEDVIREDKRRMEESKREADELIREVKKVLDDLRK

SEQ ID NO: 21475 - protein, 60 aa, Artificial Sequence
  Synthetic
KELEDLEREVREVLKRSDESLKRLEEEVRRVLDENDKEVKRVKEKVKKVLDELREIVTRR

SEQ ID NO: 21476 - protein, 59 aa, Artificial Sequence
  Synthetic
EELKREVERLIREVEEVLKKSEEAVRRLIEEVDRALKRSREEFTKAREEVKKVLEDART

SEQ ID NO: 21477 - protein, 60 aa, Artificial Sequence
  Synthetic
DEIDKARKDIEDMLRRLRDLVRKLEDLNRKVVEELKDLVRKDRKLNEDIVRRLERLVRER

SEQ ID NO: 21478 - protein, 59 aa, Artificial Sequence
  Synthetic
EEVKRRIEELLRRVDKVADEVRREVERTNRESEEVVREVEEDVRRSLEEIDKVIKDVRT

SEQ ID NO: 21479 - protein, 60 aa, Artificial Sequence
  Synthetic
SEIDELRKRVEEVLRRLDELVKRLKEENDRVVKKAEDLIRRLEETNREILKKLRKLVKDD

SEQ ID NO: 21480 - protein, 59 aa, Artificial Sequence
  Synthetic
RDVLEKIKDLLRRVKEVADEVEKKIRELNKKTEDVVRELEERVRKLDEDVKRVIEEVKR

SEQ ID NO: 21481 - protein, 60 aa, Artificial Sequence
  Synthetic
SELDEIRERIERIEKDLERLVEEVKRVNDTIVERIKKLIDEVRKENEKVIKTLRDLVREV

SEQ ID NO: 21482 - protein, 59 aa, Artificial Sequence
  Synthetic
EKVEREIRRLLERVKEVIERVKDRVRRVDKKSRDVVREARRAIEEVDRRVRKVVREAEK

SEQ ID NO: 21483 - protein, 60 aa, Artificial Sequence
  Synthetic
DEIKKLEDEVKKILDDLRELIRKLEETNRDVERRLRELIAELRKRNDEVVKRLRDLVRRS

SEQ ID NO: 21484 - protein, 59 aa, Artificial Sequence
  Synthetic
EDVKRKIEEILRRVEEEIRRLKKEVERLDRESKRVIRELREDVKRTNTDVKRVVDEVRK

SEQ ID NO: 21485 - protein, 60 aa, Artificial Sequence
  Synthetic
SLVERLEERVKRIIDELRRILEENRRRVKKVSDENRDLLRRLEEENKKIIEDLRDLKRKG

SEQ ID NO: 21486 - protein, 59 aa, Artificial Sequence
  Synthetic
EKAKDKLRRLEEEIRKVAKEVEDELRRSTEYVKKSLEDAKRKLEELTKRTEDVAEEVER

SEQ ID NO: 21487 - protein, 60 aa, Artificial Sequence
  Synthetic
DLVERVEEKVEDIKRKLRRILEEVDRRNKEVSKENKELLDRLEEENERIIRELEKAKRDG

SEQ ID NO: 21488 - protein, 59 aa, Artificial Sequence
  Synthetic
DRAREKLKRLVEDIDRVAEEVKRTLEELSRYTDKSLEDAERSLERLTKETDEVLKRVTT

SEQ ID NO: 21489 - protein, 56 aa, Artificial Sequence
  Synthetic
SIVERLKKLAEDVIRRLERLSKELAKRNKEVIERLKELSKRLEDKNRRVIEELRRT

SEQ ID NO: 21490 - protein, 59 aa, Artificial Sequence
  Synthetic
EEVKRAIEELRDRIRKVIEDSERTIRKLNDDTRKVVEDSRRTIEELNRTTDKVIEEVRR

SEQ ID NO: 21491 - protein, 56 aa, Artificial Sequence
  Synthetic
RKVDELRKEVKRVIDELRELSERLRKENERVIKTLEDLVRRLEKLLERVERELERT

SEQ ID NO: 21492 - protein, 59 aa, Artificial Sequence
  Synthetic
EEVKKEIDRLRRELDRVIKESEDTIRRLNDETRKVIEKVRRAIEELLRRIEEVIKKVEK

SEQ ID NO: 21493 - protein, 56 aa, Artificial Sequence
  Synthetic
SIVEELRELVKEAIKRLKKLSDDLRRKNEEVIRTLKELLDRLKRKNEEVIKRLEDT

SEQ ID NO: 21494 - protein, 59 aa, Artificial Sequence
  Synthetic
EEVKREIEKLKRDVERVIEDSRRTIEELNRKTEEVIERVRRTIERLNEETKKVIDRVRT

SEQ ID NO: 21495 - protein, 56 aa, Artificial Sequence
  Synthetic
REVDELRKRVEEVIRELEKLSEDLAERNRRVSERNKELVETLARLNKRVIDELRRT

SEQ ID NO: 21496 - protein, 59 aa, Artificial Sequence
  Synthetic
EEVKKAIDDLRRELEEVIKRSKKTIDDLNRYTKKSIEDVREAIKKLNKETDDVAREVKK

SEQ ID NO: 21497 - protein, 56 aa, Artificial Sequence
  Synthetic
SIVEELKKLVEEAIRKLEKLLEELEEKNRDAIRRLKELSDELRKKNEEVIERLKRT

SEQ ID NO: 21498 - protein, 59 aa, Artificial Sequence
  Synthetic
EEVKRMIEKLRRDVEKVIREVRDEIRRLNDTTRRVIDKSRKTIEELNRTTEEVIERVKR

SEQ ID NO: 21499 - protein, 60 aa, Artificial Sequence
  Synthetic
DEEEVMRELKKEIDEALERSKEINDRLRKEIRDVLEKLERIVREVKERSERVLEDVRRKV

SEQ ID NO: 21500 - protein, 55 aa, Artificial Sequence
  Synthetic
KEAVDEIRRILREALEEDKKSVEDIRRDLDKIEKDVKKVLEDNERLLKRLREEVK

SEQ ID NO: 21501 - protein, 58 aa, Artificial Sequence
  Synthetic
DEEEVMKELEDRIREVDKKIEDRLRELKERSDRVLDRSRRINKKLKDEIEDALRRVRR

SEQ ID NO: 21502 - protein, 55 aa, Artificial Sequence
  Synthetic
KEAVDTIERKLRKLEEDLKKVERDNKKLLDDMERDDRRSLEEIKRILDELLEKVR

SEQ ID NO: 21503 - protein, 58 aa, Artificial Sequence
  Synthetic
REEEVMKELDREIEEVLERSREIVERLRREIEEVLKENKKIVETLKREIKKVLREVRE

SEQ ID NO: 21504 - protein, 55 aa, Artificial Sequence
  Synthetic
EEAVKRIRDILEKDERDVREVVRRIREILKASLEDSERSVEEIRRILDELRKEVE

SEQ ID NO: 21505 - protein, 58 aa, Artificial Sequence
  Synthetic
REEEVMERLRREIEKALRESHEIDDRLRKRIEDVLRDSERKLEELRRRIKKVMDDVRR

SEQ ID NO: 21506 - protein, 55 aa, Artificial Sequence
  Synthetic
EEAVRKIREELERMKEENDRVLKEIDKDLKDDDRKIEEVVERIERILRELRERVR

SEQ ID NO: 21507 - protein, 60 aa, Artificial Sequence
  Synthetic
DEKEVADELERKIDEALKESHEIDKRSDDHDKEVLKKSEKRLRELDEEIKDVLRKLEKKV

SEQ ID NO: 21508 - protein, 55 aa, Artificial Sequence
  Synthetic
REAVETIERILKRMIERNRAVVETNKKLNKEDEDKIREVVKRIREKLRKADEEVR

SEQ ID NO: 21509 - protein, 60 aa, Artificial Sequence
  Synthetic
ETEDKVRELLKRIRDVAEKAREKVEELVRRNEEVLKRARETVERLVRKNEEVLREVAERA

SEQ ID NO: 21510 - protein, 56 aa, Artificial Sequence
  Synthetic
KKELEDTVRKVLEDLERKLERLEEESREVERRVKKVLDELKRKSEESEKRLEEAAR

SEQ ID NO: 21511 - protein, 60 aa, Artificial Sequence
  Synthetic
DAEEVVRKLEEELKRLIDKLRKVMEESLKRVKESMDRSRKRIEELVRRLEKILRDLKRDR

SEQ ID NO: 21512 - protein, 59 aa, Artificial Sequence
  Synthetic
EDVLRKLKETVERVRRKVEEVIKKSRESVKRVEETNTRSLRELEETVREVEKRVREESR

SEQ ID NO: 21513 - protein, 59 aa, Artificial Sequence
  Synthetic
SEVEKLLKDLKELLEEVKRRAEESHRDLRRLLEEVRKRVEDSNRELERELRRAEDLVRR

SEQ ID NO: 21514 - protein, 59 aa, Artificial Sequence
  Synthetic
RKMERVVEEIRREVKKVLEDLRRILKESEDAARKVLRDLERLVKHSKDTAREVLKRLKK

SEQ ID NO: 21515 - protein, 59 aa, Artificial Sequence
  Synthetic
SEIEKLLRDLERLLEEVKRKAEKTNRDLEKLLEEVKRKVEDSHRKLKKVLDEVKDLVRR

SEQ ID NO: 21516 - protein, 59 aa, Artificial Sequence
  Synthetic
ERVKRLVEDVRRRVKEVLDDLRRIIEHSRRRAEKVLRELEKLVRESETKAREVLKDLKK

SEQ ID NO: 21517 - protein, 56 aa, Artificial Sequence
  Synthetic
SEAERLLEDSKRVLDEIREDLKRLLKESEDVMREIEKTLEKLVRDVERVLDEVRKS

SEQ ID NO: 21518 - protein, 56 aa, Artificial Sequence
  Synthetic
ERVLRTIKDLHRRLSEEVKRVLDEAEELHRRLSERVREVLEDIRRLVEELIEEVRK

SEQ ID NO: 21519 - protein, 56 aa, Artificial Sequence
  Synthetic
SEAEDLLRRSKERLDEVRKRLDELRRRSERVVEEIRRLLKELLDDVERVRKEVKEA

SEQ ID NO: 21520 - protein, 56 aa, Artificial Sequence
  Synthetic
DRVLRTIEDTHRRLSEDVKRVLKEAEELHRRVTEEVKDVLRKIRETAERLEEEVKK

SEQ ID NO: 21521 - protein, 56 aa, Artificial Sequence
  Synthetic
KEAEELLDTSRRVSEEVEKRLEKLLRESERVAEEIRKRLEELLRRVEKVLDELRKA

SEQ ID NO: 21522 - protein, 56 aa, Artificial Sequence
  Synthetic
EKVLKTIEDEHRRLSESVERVLRTAKRLHDEVSKEVRDVLEEIRRTVEKIIREVRT

SEQ ID NO: 21523 - protein, 60 aa, Artificial Sequence
  Synthetic
SVEEVLKTLEDLARESSEEVRRVAEEIERSNRRVVKEVEKVLREIEELNRKILEEVERDL

SEQ ID NO: 21524 - protein, 59 aa, Artificial Sequence
  Synthetic
EEVLRELLKEVAKVVEDTRRKLEELLKENEEMDRDLKRKLDELLERNREVLERLKRKVD

SEQ ID NO: 21525 - protein, 60 aa, Artificial Sequence
  Synthetic
SVEEVLKELEKLVRDSSREIKKVLEEIDKSNTDLLREVEDALRRIEERVKEALESVDRTV

SEQ ID NO: 21526 - protein, 59 aa, Artificial Sequence
  Synthetic
REMLERLLDTLRRRLEETRKELERLLTENKKKDDEVKEKLKRAEEELEDVRRRLEEKLR

SEQ ID NO: 21527 - protein, 60 aa, Artificial Sequence
  Synthetic
SAEEVLRRLKEAIKRLIRDSERVLEEIRRTNEELIKRTEEVLRRVREKAERLIDDVRRRL

SEQ ID NO: 21528 - protein, 59 aa, Artificial Sequence
  Synthetic
DEALRRIEKEVRDVEKRSKETLEDSKRDSERVRKKSEDTLREIETRVEDVRRKAEEEVR

SEQ ID NO: 21529 - protein, 59 aa, Artificial Sequence
  Synthetic
SESDRIRAIVKKVVDESKESLKRLKEETERVKRELDRVLKENKDKVRRLKEKAEEMKKL

SEQ ID NO: 21530 - protein, 56 aa, Artificial Sequence
  Synthetic
SDVLREVAERVTRLIRDSERVLEELAREHEKASRKVKKVLDESKKIVDDVIRRVDR

SEQ ID NO: 21531 - protein, 59 aa, Artificial Sequence
  Synthetic
SESEEIERTVEDVKRKSDKSLEESRRNVERLKEESEESLERNKDLVRRVAEKVEEVKRD

SEQ ID NO: 21532 - protein, 56 aa, Artificial Sequence
  Synthetic
SEAADRVREEVTKVIKKSEDVLRDSERLHREVIKTSRDVLDKSRRLVEEIIRRVRR

SEQ ID NO: 21533 - protein, 59 aa, Artificial Sequence
  Synthetic
SDVERVLREVEEIIRKARDRSREWLERVKKIIEKVKEDSKRWLDEVRKLIRDVEDIRRR

SEQ ID NO: 21534 - protein, 58 aa, Artificial Sequence
  Synthetic
ERVREVIDRIRKLLKDIIDEARDVNKKVRDLLKRIVEEVTEVNKRVKELVEEIVRRIK

SEQ ID NO: 21535 - protein, 59 aa, Artificial Sequence
  Synthetic
DELREALKRVADIVRTIEEAVRKSLEDSKRIVDDIRRASKEALEEVEKIVRTLVEIVRN

SEQ ID NO: 21536 - protein, 58 aa, Artificial Sequence
  Synthetic
KEVRDVIREVEKLLREVEKIVRDVNRESERLAKEVRDDATEVNERVKELLKRAEAAVR

SEQ ID NO: 21537 - protein, 59 aa, Artificial Sequence
  Synthetic
SVVEELRRTVKELLDEIKRRDDRLLKEVEEVAREVERKDDELRKKVEEILRRIKELRDR

SEQ ID NO: 21538 - protein, 55 aa, Artificial Sequence
  Synthetic
DRVLKELKELMDEAKKNSERVNKKVEDLLRRLDESSRRVNEEIEKRLTELLKAVE

SEQ ID NO: 21539 - protein, 59 aa, Artificial Sequence
  Synthetic
SVVEELLKRVRERLEDVDRVLRTWLEEVERLAEEVKRLDRELEKDVKRILDTIEELKRQ

SEQ ID NO: 21540 - protein, 55 aa, Artificial Sequence
  Synthetic
DKALEDIKRLLEELRKRVEDVSRRVNKLLRDLEENSKRVNDELRKRVETLVERVR

SEQ ID NO: 21541 - protein, 61 aa, Artificial Sequence
  Synthetic
REIEKVLKELRDIVRELEKLLEDVVRKIRKIVEETRKLLEDVVRESDKIHRDAKELMERAG

SEQ ID NO: 21542 - protein, 56 aa, Artificial Sequence
  Synthetic
EDELRKRIAELAERVKRMVKKLDEHAKRDFRRVEEEVRRLRENVKRVKDEVDEAVR

SEQ ID NO: 21543 - protein, 61 aa, Artificial Sequence
  Synthetic
SEIEKVLEELRRRVEELEERLKTVVDELKKIARRTEEKLDKVREEIERIYREAKDLLRRAG

SEQ ID NO: 21544 - protein, 56 aa, Artificial Sequence
  Synthetic
SDELRKAIAELERRVDKMLKELRDHITRDEDRVRRILEELRRHVERSLKRVREEVN

SEQ ID NO: 21545 - protein, 62 aa, Artificial Sequence
  Synthetic
SELEKVLEDVERRLRELKERNDRVLEEITKIHEDAKRENDEVLKEISRAHKEATEELERKIG

SEQ ID NO: 21546 - protein, 56 aa, Artificial Sequence
  Synthetic
LEELRRKLKELEERSERHLEELRRSAETVLRESREHLRRLEDSLRRVRKKVKEETD

SEQ ID NO: 21547 - protein, 62 aa, Artificial Sequence
  Synthetic
SEIETVLRDVKDKLEKLKRDNDKVLDEITKIHEEAMRRNDKVLEDIRRALEELKKRLEEKIG

SEQ ID NO: 21548 - protein, 56 aa, Artificial Sequence
  Synthetic
LEELKKELKKLEDESRKHLEELRRSLEEVTRRSDKHLKELKDRLEELRRKVEAATD

SEQ ID NO: 21549 - protein, 62 aa, Artificial Sequence
  Synthetic
SELEKVLEEIRRELEKLERANKKVLDDAKRIHDKAKEDLRRVLEEIKRRLEELEKRLEEAIG

SEQ ID NO: 21550 - protein, 56 aa, Artificial Sequence
  Synthetic
VEELRKELEDLRRESEEHLERLRDSARRVLEKVRRILKELRDRLRELAEEVKRATD

SEQ ID NO: 21551 - protein, 62 aa, Artificial Sequence
  Synthetic
DELETVLKRVEDLLRRLAEELRRVLEEARETLERLKAANEKVLEEITRTHEEAKRRLDRDIG

SEQ ID NO: 21552 - protein, 56 aa, Artificial Sequence
  Synthetic
VEELDKEAKDLVKEVDEILKRIREELKKLKEDNDKHLEELKESLKRVKDEVDEARR

SEQ ID NO: 21553 - protein, 62 aa, Artificial Sequence
  Synthetic
SELEDVLRDAERIIREAKEDNERVLRRLKETVEKLIKDNDEVLKKLTESHKKLTKELKDAIG

SEQ ID NO: 21554 - protein, 56 aa, Artificial Sequence
  Synthetic
VEELKEEIKDILRRNREHLEELKRRIDELRKENEKHLRDLEESIKEVEKEVRESRR

SEQ ID NO: 21555 - protein, 61 aa, Artificial Sequence
  Synthetic
SEIETVLEDAERKIRELKKRLEDVLRRLAEIYTRAKELLKRVLDELRKIYEDLKKKLEEKV

SEQ ID NO: 21556 - protein, 56 aa, Artificial Sequence
  Synthetic
VEELKKRLDEVARRVEKVLRENEEEIKESLKEVEKMLRRNRKEIKDSEKEVDDEVK

SEQ ID NO: 21557 - protein, 61 aa, Artificial Sequence
  Synthetic
DELERVLEDAETKIRDLKRKLKEVLDKLRRIYEELEERLKRVLEEIEEIYRRAAEALRRKV

SEQ ID NO: 21558 - protein, 56 aa, Artificial Sequence
  Synthetic
VEELKRELEEVAKRVEEILRRNEEEIKKSEEKIRKVLRDNREKAKRSLDRVREALK

SEQ ID NO: 21559 - protein, 61 aa, Artificial Sequence
  Synthetic
DELKKVLDDARETSDRLKKENETVFRELEEIYRRLEKELRRVLRELEEIYRRAEDKLTKSV

SEQ ID NO: 21560 - protein, 56 aa, Artificial Sequence
  Synthetic
VSELDKRIRELERRNRESVKENRDRLKESADDVKRALDRNREELEESERRVKKAVD

SEQ ID NO: 21561 - protein, 61 aa, Artificial Sequence
  Synthetic
SELEKALRDAEEIIKKAKKLLKEALDEAEKIYREAAKLLDDALREAEKIYREAADALDKKV

SEQ ID NO: 21562 - protein, 56 aa, Artificial Sequence
  Synthetic
AKELRDRAKEAADRAKRAAEENRKKARESLERAKRAAEDNRKKAEESLKRAEETAR

SEQ ID NO: 21563 - protein, 61 aa, Artificial Sequence
  Synthetic
SEIEDVLRRAKEISDRLKRENDRVLDELRRSYEDLERELEEVLRKLEETYRRAKEELRKKV

SEQ ID NO: 21564 - protein, 56 aa, Artificial Sequence
  Synthetic
VSELRERIERLKERNRKSLEKNKRDIARSEEEVRKALERNEDEIRRSEEEVKKALK

SEQ ID NO: 21565 - protein, 61 aa, Artificial Sequence
  Synthetic
RELEKVLEDIREISERLEKRNRDVLKELEDIYREAKKRLDDVLRKLKETYDRAEEELRRKV

SEQ ID NO: 21566 - protein, 56 aa, Artificial Sequence
  Synthetic
VSELRKDLRKLAEDNRRSLEENKKEITESLKEVEKVLERNKDEIRKSKERVDKALE

SEQ ID NO: 21567 - protein, 61 aa, Artificial Sequence
  Synthetic
SELERVLDEMRKIIERLEEELRKVLEDLRRIYEELKRKLDDSLRESERRVRELKEELDRKV

SEQ ID NO: 21568 - protein, 56 aa, Artificial Sequence
  Synthetic
VEELKDTIDKVKKRVEDALEKNRRDIDESRKEVDDELRKDEEKAERLAREVEKAKE

SEQ ID NO: 21569 - protein, 59 aa, Artificial Sequence
  Synthetic
SSDETVKEKVKKVARDVDRHVEKLRKALEEMEREVREHVKRLEDELRRMDEEVKRVREE

SEQ ID NO: 21570 - protein, 55 aa, Artificial Sequence
  Synthetic
EKVLRDAERIVRELERKLDKVDTEIAETVKRLEDTIRDVNRKIKDRVDKLRKELE

SEQ ID NO: 21571 - protein, 59 aa, Artificial Sequence
  Synthetic
DSDEKVKRVLEELRKEVKEHVERLRARAEDMSREVKDHVRKLKEDLERMERDVERVKRK

SEQ ID NO: 21572 - protein, 55 aa, Artificial Sequence
  Synthetic
EEVLERVRTEVERLKRELDKVNEDIRKRVEELKKELDEVDDEIRKEVDRLEEALK

SEQ ID NO: 21573 - protein, 59 aa, Artificial Sequence
  Synthetic
SSDEEVKKKLEEVKEEVKRHVERLKRALEKADRDVKDHVRRLKEVLKRMADEVEKVRRE

SEQ ID NO: 21574 - protein, 55 aa, Artificial Sequence
  Synthetic
EKVLKDVEEKIRRLEKELDEVNEDIERKVRELEKELRAVDEEIKRIVDRLRKELE

SEQ ID NO: 21575 - protein, 59 aa, Artificial Sequence
  Synthetic
SSSERVKTELDRMRKEVKRHVEELEKELKRLTEKVKRHVEESKKNAEEITRKVEDVRRK

SEQ ID NO: 21576 - protein, 55 aa, Artificial Sequence
  Synthetic
EEVLREVTREVTRLREELDEVNKRVEKRLEELERELDRSDEEVTRIVEELVDELR

SEQ ID NO: 21577 - protein, 59 aa, Artificial Sequence
  Synthetic
SSEEDVRRKLEKMRKEVDEHVRKLEEDLKRLAEEVKRHVEDLERVAKEVADRVEEVRRQ

SEQ ID NO: 21578 - protein, 55 aa, Artificial Sequence
  Synthetic
KKVLDTARDILRKLEKKLDDVDEKIERIVEKLKRELDEVNKRATETVERLIRELK

SEQ ID NO: 21579 - protein, 59 aa, Artificial Sequence
  Synthetic
RSDEELEKKLKELKEEVDEHVKRLEETARRLDKEVRRHVEESKRNLEEMDREVKEVRRR

SEQ ID NO: 21580 - protein, 55 aa, Artificial Sequence
  Synthetic
DKLLERAERTVRELERRLDEVNDRIRRIVEELKRKLDRSNEEVTRKVRELSKELE

SEQ ID NO: 21581 - protein, 61 aa, Artificial Sequence
  Synthetic
DELERVVEEVRKRIERLKEELRRVHERSREIVDRLRKELEKSLEEVRRIVEDLKRKLRERG

SEQ ID NO: 21582 - protein, 56 aa, Artificial Sequence
  Synthetic
EEDLERMADKLRKDVERAVRKNETDADKLRREVEEVVRRNKKTAKELEDEVRKELT

SEQ ID NO: 21583 - protein, 61 aa, Artificial Sequence
  Synthetic
SEREKVAKEATDIVEELKKTLKDVHRRSKEIVERLVKKLADVNKDSRDKAEELKKRLDDRG

SEQ ID NO: 21584 - protein, 56 aa, Artificial Sequence
  Synthetic
EEDVKRIAKKLEEDVRRVVRKNEEEIKKLAEEVDRVVEDNKRLVEELKRRVDEALK

SEQ ID NO: 21585 - protein, 59 aa, Artificial Sequence
  Synthetic
DADDELRKIVEEADRRSKESVREIEELLRKLEREVEDIVRRIKKLSDDTRKRIDDLRKE

SEQ ID NO: 21586 - protein, 55 aa, Artificial Sequence
  Synthetic
EEVLKRVEEIIKRLEEENRKVLEELERSVRKLEEDIRKVLEDNDRVVKELARRID

SEQ ID NO: 21587 - protein, 59 aa, Artificial Sequence
  Synthetic
SAVEKLEELVERVARRIDELVKKIKELLDDVERKSEKTVRDLERLSEETKRSIDDLRRE

SEQ ID NO: 21588 - protein, 55 aa, Artificial Sequence
  Synthetic
EEVLKRVRETLERLERKIKKVLDELKKRVEELRKKNEDVVRRNEEVVKKLVEDIR

SEQ ID NO: 21589 - protein, 59 aa, Artificial Sequence
  Synthetic
SVEDVIRDLRRVITESRELSERVLERIEETTRRSKEESKRVADKVKKSSDDLREAVERI

SEQ ID NO: 21590 - protein, 59 aa, Artificial Sequence
  Synthetic
DEKAKELLRRVKEVVDRNKEKLDRDLERNKRRIDENRRKLEEDLRRNRKVVEELRKRLE

SEQ ID NO: 21591 - protein, 59 aa, Artificial Sequence
  Synthetic
SVEDVAREIREVLRRLEESVRKVAEDNRRNNEELRRLVEEVLKRIRDSSDRLRKVVEDI

SEQ ID NO: 21592 - protein, 59 aa, Artificial Sequence
  Synthetic
DEVLERLLRRVREAVKELEDELERSSREDNRRSRELEEELKKDLKRNEDEIRDVERALK

SEQ ID NO: 21593 - protein, 59 aa, Artificial Sequence
  Synthetic
SVEEVLRRAEEILTRSKEESRRVFEEIRETTERSKEVSKDVARRNKEILDDLKRKIEEV

SEQ ID NO: 21594 - protein, 59 aa, Artificial Sequence
  Synthetic
DDVLRRLLEKIEEVVRDNERELKEDLDRNRKVIEENRKKLEDHLRRTEEEVDDIRRKLK

SEQ ID NO: 21595 - protein, 59 aa, Artificial Sequence
  Synthetic
KVEEVSKKLKDVLRELEELVERVLERNRENNERLRDKVRKVLEENKEVLDRLKKEVDDI

SEQ ID NO: 21596 - protein, 59 aa, Artificial Sequence
  Synthetic
EEDLRRLLEKIKREIDRLAKELEDSSRDDNRISRELDEELKRHLEETRRAVREISEKLR

SEQ ID NO: 21597 - protein, 57 aa, Artificial Sequence
  Synthetic
SRAEEVLKKVEEEVKKLEDELRRSSERNNRESRRLEDELKKVLDKNRKLVEDLRRAR

SEQ ID NO: 21598 - protein, 56 aa, Artificial Sequence
  Synthetic
KEVVDELRRVLERLRRVIEDVIRRNKEDTDRLEREIERVRKELKDINKKLEEDVRR

SEQ ID NO: 21599 - protein, 60 aa, Artificial Sequence
  Synthetic
DEAETLLRDVERKVEELKRRSEKLLRDVEELVRRLLRSNEESLKKVKEDLKRLKDLVRRG

SEQ ID NO: 21600 - protein, 56 aa, Artificial Sequence
  Synthetic
DEVLREVDRVIDDVRRALKKVNEEIEEVIRRLKRESERVNKEAEEIIRTLEDALRK

SEQ ID NO: 21601 - protein, 57 aa, Artificial Sequence
  Synthetic
DDLERVLEEIRREIERIRRELEESNEENKDIVRRIEEELKELLKDNKRIVETVTKAN

SEQ ID NO: 21602 - protein, 56 aa, Artificial Sequence
  Synthetic
REVLERLEKELDRLRKDIERVADENRKINDTLRKRIEEVMARLDEINTDLKDRVET

SEQ ID NO: 21603 - protein, 56 aa, Artificial Sequence
  Synthetic
SSDEVLKEIEEIIRRLEEEVRRVNKEVNKSTEDLRREVEEVLRRTNELIEELERRV

SEQ ID NO: 21604 - protein, 59 aa, Artificial Sequence
  Synthetic
EEALRKAIKDVRDIVKKVKDELKEWRDRNKELVDRLSEELKEWLKDVERVLKELTDKDR

SEQ ID NO: 21605 - protein, 56 aa, Artificial Sequence
  Synthetic
SLEEVLERIKRIIDELKREAKRVLDETNTLIREVKKRLEDVNRDVNRLIEELRERV

SEQ ID NO: 21606 - protein, 57 aa, Artificial Sequence
  Synthetic
MVRDLERRIREVVKRLKEDLERWKKEVEDEIKRLEDRLKEWLDRVREMLEKLREEDR

SEQ ID NO: 21607 - protein, 56 aa, Artificial Sequence
  Synthetic
SSEEVLKTIKDIIDELRKEAEEVLRRTNESTKELEERAEEVNKRVNDSTRELAKKV

SEQ ID NO: 21608 - protein, 59 aa, Artificial Sequence
  Synthetic
EEMLDEVKKRAEKVVEDLRRELRKWLEDNKRLVEKLEKELRDWLKENKELVKELEDRDR

SEQ ID NO: 21609 - protein, 56 aa, Artificial Sequence
  Synthetic
SSEEVLDTLRKLIEDLRRRAEEVLERTNRSTDELRKRVEKVLEETNRLIKKVEDDI

SEQ ID NO: 21610 - protein, 59 aa, Artificial Sequence
  Synthetic
EDMLREALERIKEIIDRLERELEEWIKTNEDLVRRLTEDLERWLRTVAEILKRLKDEDD

SEQ ID NO: 21611 - protein, 60 aa, Artificial Sequence
  Synthetic
DELERVEEEIKKLSDDSRRVIEEVRRRLEESNKDLERRLREVEKRLKELTDDIKRTAERN

SEQ ID NO: 21612 - protein, 59 aa, Artificial Sequence
  Synthetic
RELLRKLLDDVRRVVERNKRKLRKDLEDNKREIERVKREADKDLEDHERVIRKLKEDIR

SEQ ID NO: 21613 - protein, 60 aa, Artificial Sequence
  Synthetic
DELERVVEEIRELSRDSERAIEEVRRELKRTNDENRESAKRVAEELKKLTDKIKEEADRN

SEQ ID NO: 21614 - protein, 59 aa, Artificial Sequence
  Synthetic
RELLRELLKEVRRVVEENKRRLEEDLKKNRKKIDDSNKELRKDLEDHRRVIEKLEREIR

SEQ ID NO: 21615 - protein, 58 aa, Artificial Sequence
  Synthetic
DELEKVKEDIKRLLDDVRREVEKVNRDSRRLLEDLRRVVKEVSDRSKELAEDLERKVG

SEQ ID NO: 21616 - protein, 56 aa, Artificial Sequence
  Synthetic
VEDVLREVKRLAEEVKKETKRVLDEIKKLVEDVARELERILEDSERLIREVEKRAT

SEQ ID NO: 21617 - protein, 58 aa, Artificial Sequence
  Synthetic
DEIEDVLRRAKKLLDDLRRVVKKANDDSRRLLKKLKDKVEEVSRRSRRLAEDLERTVG

SEQ ID NO: 21618 - protein, 56 aa, Artificial Sequence
  Synthetic
VEDVLREVRKIIEDVKRASEKILEESRKLIEDVERRLEEILKRSEDLIRTVKERKR

SEQ ID NO: 21619 - protein, 60 aa, Artificial Sequence
  Synthetic
DELERVLEEIKRLLDDVHRESKRVNEESERLVKKLHDDSRRVLTEIKKLLDDVRRVVEEL

SEQ ID NO: 21620 - protein, 58 aa, Artificial Sequence
  Synthetic
EKVEEILRRVRELVKKWKTELERALEENEREVERWKRDLDRILEEVRRVVERVEREIR

SEQ ID NO: 21621 - protein, 59 aa, Artificial Sequence
  Synthetic
DELEKLLEDIRRELKRVREDDKRHNDKVKETLDRVRELIKRLLELIKKVADEIRSLKRR

SEQ ID NO: 21622 - protein, 58 aa, Artificial Sequence
  Synthetic
REVEEVKRRIEEILKEAEETNRRSHEKAKRVLEELKDIVRKVLEELRRLLRELEEEVR

SEQ ID NO: 21623 - protein, 59 aa, Artificial Sequence
  Synthetic
EELERLREEIKKILDEARERDETLLREIRREHEKNKRADEEHNRRVEETLERIERLAER

SEQ ID NO: 21624 - protein, 58 aa, Artificial Sequence
  Synthetic
EEVRAVERELRKILDEIRKTNKEVHDRIRELLERSKRSNDESHKKVEDVLRELKKRVD

SEQ ID NO: 21625 - protein, 59 aa, Artificial Sequence
  Synthetic
SETDEVRKELRKLLEDSRRAVEEVKKKLDDSNKEVRDRVRRIREELKKLEKEVREIKRK

SEQ ID NO: 21626 - protein, 55 aa, Artificial Sequence
  Synthetic
EELLKELEEVLKRLRELHKRTIDEVEKSAREVKDEIRRLEEELDRVLKKLEDALR

SEQ ID NO: 21627 - protein, 59 aa, Artificial Sequence
  Synthetic
SLDEDVERLIKELKDEARKLNEEMKEYVRDSERKVRRLNEEIRRLIEELKRKAEELKRG

SEQ ID NO: 21628 - protein, 55 aa, Artificial Sequence
  Synthetic
DRVKERLERVLDEAEKSNEETLRELDDVSRRIEESNRRTLAELEKVLRDIEKDVT

SEQ ID NO: 21629 - protein, 60 aa, Artificial Sequence
  Synthetic
SELEKLVEDLRRAAKESHERNEKLLDESRKTVEDVKRKLEEILRRSEEVVREIKKKKKDI

SEQ ID NO: 21630 - protein, 55 aa, Artificial Sequence
  Synthetic
EEVRRRVEKLIEENRRSSRRVEEEDKRLLKELKDAIKRVEEEDKKLVEELRRSEK

SEQ ID NO: 21631 - protein, 60 aa, Artificial Sequence
  Synthetic
KEVEDLVKEVKERIEESHKENKRILDKARRVVERVETDLRRILEESKRTVEDIERRKERI

SEQ ID NO: 21632 - protein, 55 aa, Artificial Sequence
  Synthetic
EEMKKAVDELIERNKRSSDRVREEAKKLIDRLEEVIEKVERDDEKLVRDLEEELR

SEQ ID NO: 21633 - protein, 61 aa, Artificial Sequence
  Synthetic
SSLETLEKIARDLLREVKETLDRVREESRRLLEEVRRVAEESRKEVERLLKELEEVIRREV

SEQ ID NO: 21634 - protein, 59 aa, Artificial Sequence
  Synthetic
DELLRELAERVRRVVKKIKDELRDDLRRTREEVERLKERHKELVKRVKEAVDKIREEIR

SEQ ID NO: 21635 - protein, 60 aa, Artificial Sequence
  Synthetic
KEVEEILRDVARLVEDNRRVLERILREVEKLIRDNEERLKEILERSKDLVRRIEELIRRG

SEQ ID NO: 21636 - protein, 55 aa, Artificial Sequence
  Synthetic
EEVRRAIEELLKDVERAYEEVVRRIEKLLDDLRRKYEEVKKENERLNRRVEEAAR

SEQ ID NO: 21637 - protein, 60 aa, Artificial Sequence
  Synthetic
DDVEDILRDVERLVEENRRRLEEIVRESEDKVRKNDETLKKILEDVKREVERVERAIERG

SEQ ID NO: 21638 - protein, 55 aa, Artificial Sequence
  Synthetic
KDVVRAIEELLKDVEEKYRRVSERNKELNKRVEDTYREVMKEIRRLLERVDRRAR

SEQ ID NO: 21639 - protein, 57 aa, Artificial Sequence
  Synthetic
TEVERLVERVKEIVEEHRKKLEELARRSEELVERHEKKLRDLLRESRELVERAKKEN

SEQ ID NO: 21640 - protein, 54 aa, Artificial Sequence
  Synthetic
EIKERLKELLREAEEVSRRVNKRNEDLLRRLEKVSREVNERNEDLLEELDRTVN

SEQ ID NO: 21641 - protein, 56 aa, Artificial Sequence
  Synthetic
DEVERLVEEVEKLVEEWIRDLERILDESRRTVEEWKKELKRLLDRSKRLVEDAKRK

SEQ ID NO: 21642 - protein, 54 aa, Artificial Sequence
  Synthetic
DIERRLERLMEELHRVSKEVLDADRELLKELHDVSREVNKRNEELLDELRKTVT

SEQ ID NO: 21643 - protein, 57 aa, Artificial Sequence
  Synthetic
DEVEETVKRVREEVERWKEELKRIADEVRRLVEKVKDDLRRLLDESRKLVEEVRREN

SEQ ID NO: 21644 - protein, 54 aa, Artificial Sequence
  Synthetic
EIKRRLEELLKELHKVSKDLDKILEELLREVEEVVRRVNETNKKLLKELDETVR

SEQ ID NO: 21645 - protein, 57 aa, Artificial Sequence
  Synthetic
SEVEELVKRAAELADEARKRLERIMEEVKRLVDEWEKELKKLLDESKELVEKVRREN

SEQ ID NO: 21646 - protein, 54 aa, Artificial Sequence
  Synthetic
KVREDLRRLLDTLRKVVEELKRRLRELLKKLHDVSRKVNEENERLLRELEETVR

SEQ ID NO: 21647 - protein, 57 aa, Artificial Sequence
  Synthetic
DEAEKLVDEVRELVRRHKETLKEILERVKELVKRWKDTLDKLLRDSEELVRRVKEEN

SEQ ID NO: 21648 - protein, 54 aa, Artificial Sequence
  Synthetic
RVKEELKRLLKELKEMSKRLTEELRRLLKELHDRSREVNERNKRLLEEVDRTVK

SEQ ID NO: 21649 - protein, 56 aa, Artificial Sequence
  Synthetic
DEIREVEERNRRSNEEMKKAVREVEKDIERVAREIRKRAEEVSKRNEDINREIRKT

SEQ ID NO: 21650 - protein, 59 aa, Artificial Sequence
  Synthetic
DETLRRVIRKSEELLKRLKDRLDEVRKRVEEILKRAEERLREVIKRSEELLEEVKRESD

SEQ ID NO: 21651 - protein, 56 aa, Artificial Sequence
  Synthetic
SLLEEVEKTLRKIVEDSDREIKRVSKKNKETVKRLEELMREVNRRSTEIVKRIRDS

SEQ ID NO: 21652 - protein, 59 aa, Artificial Sequence
  Synthetic
KEMLDRIIEEAKRLHEENKRKLEEVERRSEELLKELKRRLEELIKRNDDLLREVEERKR

SEQ ID NO: 21653 - protein, 60 aa, Artificial Sequence
  Synthetic
DEVEEVIRRAEELVKEVKKRLEELIRESEALLERVKRRLERLIEESRRRLEEVKKKVSSG

SEQ ID NO: 21654 - protein, 54 aa, Artificial Sequence
  Synthetic
EIKKRLRKLLEEIKKVVDDVRETNKRTLERLEELARRVNEENKKILDDLEEAVR

SEQ ID NO: 21655 - protein, 60 aa, Artificial Sequence
  Synthetic
KEVDEVVKRAEDLLREVKKRLDEVIEDSERLLREVRKRLEEIIRESEKLLEDVRKVVERG

SEQ ID NO: 21656 - protein, 54 aa, Artificial Sequence
  Synthetic
EIEKRLEEILREIKKLVEEVNRRNEDILRRLEREVEKVRRVNEKTLERIEETVR

SEQ ID NO: 21657 - protein, 60 aa, Artificial Sequence
  Synthetic
SLVEDIRRDVKRILKEIDKLVKDIEEENRRASRESERLVETIRREVKEVLDRIRKLVRDV

SEQ ID NO: 21658 - protein, 59 aa, Artificial Sequence
  Synthetic
RKLIEEIRRRLKKALEDIRRLIEESRKRVEESLTRSRKLAEDIRRELEDVLRKVDEDAK

SEQ ID NO: 21659 - protein, 56 aa, Artificial Sequence
  Synthetic
SRVKEVADRVRDIVRRIKDEIKEHVDRLRDVIRRIKEKLEEHSRRLREIVERIRAS

SEQ ID NO: 21660 - protein, 59 aa, Artificial Sequence
  Synthetic
EELLKRLEDIIRKLLEDIKRVVKELEEVSRTLLREIEELLEENRKSMEKLLRDIEEEAR

SEQ ID NO: 21661 - protein, 56 aa, Artificial Sequence
  Synthetic
SKVDEVVKRLEDAVREIKKEIDKHSKELADEVEKIKKELKDVSDRNREVVRRIREA

SEQ ID NO: 21662 - protein, 59 aa, Artificial Sequence
  Synthetic
EKKAEELRKRVDDLLEEIRRLLEENKRTVDKLLDEIKRVLEDHRRSVEELLREIDKDAK

SEQ ID NO: 21663 - protein, 56 aa, Artificial Sequence
  Synthetic
SEVDEVLREAKRIVDEVHKDNERATEESRRLVKKVHEENEEMVKDIERIVKEVKDA

SEQ ID NO: 21664 - protein, 55 aa, Artificial Sequence
  Synthetic
KELEREVEKLLKRIEESLRRHRKENKRLLEELDRSLRELAKIVKEVLDEIRERTR

SEQ ID NO: 21665 - protein, 56 aa, Artificial Sequence
  Synthetic
SEIEDAVRRIEKRVEEVHRENKKLTDESRKLVREVDEENKKVSRESKKLVEDARRR

SEQ ID NO: 21666 - protein, 55 aa, Artificial Sequence
  Synthetic
RELSEKVREVLEKIKKSLEDHRKANEDLLREIRDSLKKHRDENRRLLKELEETRK

SEQ ID NO: 21667 - protein, 57 aa, Artificial Sequence
  Synthetic
SDLDRVAKELTEIVERIIRELERLTEKSRDIVRKVHKENEDAVRKIRKIVEEVKRKK

SEQ ID NO: 21668 - protein, 55 aa, Artificial Sequence
  Synthetic
RELEKRVRDLLRRVEEALRRHKEENRKLLEDIKRSLEEVAKEVERVLKEIKDTAR

SEQ ID NO: 21669 - protein, 57 aa, Artificial Sequence
  Synthetic
SEMDDVLKKLAETVKRIIERLKKLTDDSRRLVEEVHRRNDKLSKESREAVRKAEERN

SEQ ID NO: 21670 - protein, 55 aa, Artificial Sequence
  Synthetic
RELSEEVKKLLDEVRKALKRHKDENDKLLKEIEDSLRRHKEENDRLLEKLKESTR

SEQ ID NO: 21671 - protein, 57 aa, Artificial Sequence
  Synthetic
DEAREILKEIRDIADELRKRLERLTERSERIVREVDKENRRVVEEIREIVERVKKAK

SEQ ID NO: 21672 - protein, 55 aa, Artificial Sequence
  Synthetic
RELKKEVERVLEEIRRLLEEHERANRKLLKEIRDSLRELKKRVEEVLREIKEATK

SEQ ID NO: 21673 - protein, 57 aa, Artificial Sequence
  Synthetic
SEAEEMLERIKRRVEEVNKENKKMTDESKKIAEDVDRDNREVLREIKRIVDEVRKRN

SEQ ID NO: 21674 - protein, 55 aa, Artificial Sequence
  Synthetic
KELEKEVERVLKEIKDSLRRHRKENEDILREIKESLDELDKEVKRVLKEIRDTAR

SEQ ID NO: 21675 - protein, 57 aa, Artificial Sequence
  Synthetic
SELEEVAKELRKTLEDSTRENKKHTDDVRRIVDEVDKRNRKAVEDIRKIVDEVRKRK

SEQ ID NO: 21676 - protein, 55 aa, Artificial Sequence
  Synthetic
RELEEIVKRLNERDKEVLEKDAEDVKRVLEEIKESLERVARDVERVLEDIKRATD

SEQ ID NO: 21677 - protein, 61 aa, Artificial Sequence
  Synthetic
SALEDLERKVEELIRRLDELLREHRETLERLIRELDKLLTDHHRRNRELLERIKDVVRKAG

SEQ ID NO: 21678 - protein, 59 aa, Artificial Sequence
  Synthetic
EDKLRKIVEELERLVDEVRRSLEKASKRLKDLVKEVKKRLEDITRESEELVRRVEERTR

SEQ ID NO: 21679 - protein, 61 aa, Artificial Sequence
  Synthetic
SALEELKKEIKRVIEELKRALERHHKENEELRKRIDEVLKEHHDANRRLLEEIKELVRRAG

SEQ ID NO: 21680 - protein, 59 aa, Artificial Sequence
  Synthetic
EEKLKEIVKEIRKKVEELKDDLRRMSEESRRLVEELEERLRRLTERSKRLVEDVRRRVT

SEQ ID NO: 21681 - protein, 56 aa, Artificial Sequence
  Synthetic
SEKEELDRKIEDVRKKVEETSRKLKRVNDESKKEVKRTSDELRKKSKEVNEAVERE

SEQ ID NO: 21682 - protein, 56 aa, Artificial Sequence
  Synthetic
VEEAIRRLKETLDRHREEVEDLIRKSREVLKRHEERVRELIKRHEDTLRELKKRAK

SEQ ID NO: 21683 - protein, 60 aa, Artificial Sequence
  Synthetic
SEVDELMKRLKDEAEDIKEKVERLIREWEEAARKIAERVEKLVRDWERVIETLRDLKKRV

SEQ ID NO: 21684 - protein, 59 aa, Artificial Sequence
  Synthetic
KDLAERLRRVLREVERLVRTVNKKHREVLEEIRKEVERVNDEHRRVLEEIKRRVEKDVK

SEQ ID NO: 21685 - protein, 60 aa, Artificial Sequence
  Synthetic
SAEEKLDTEVRRIAEEVKRIIDELRKVTEEVEKRIREINKTSEDTSREVKKTIREVLKRL

SEQ ID NO: 21686 - protein, 59 aa, Artificial Sequence
  Synthetic
EDTVEEVLERLRRALEKADKLVKDHIKRLKDVLRAIEEDHRRHLERLRRMLEEIKKEVT

SEQ ID NO: 21687 - protein, 60 aa, Artificial Sequence
  Synthetic
SVEEKLTREAERLLKRIEEVIRRLRDANRRSADRIRRIDEKTRREVEKLKKKIRELAKRV

SEQ ID NO: 21688 - protein, 58 aa, Artificial Sequence
  Synthetic
DLVEKVIKTMRKIVEDLERDVRKVIRDDEELVERLRRENEEVIKKLREIVKRLEDETR

SEQ ID NO: 21689 - protein, 60 aa, Artificial Sequence
  Synthetic
SLIERLREVAEDLKRRIRKVLEDLRRANEESAKRIRDIDRRTREANRESNERIKEIAKRV

SEQ ID NO: 21690 - protein, 58 aa, Artificial Sequence
  Synthetic
EKVKKVIDDMERIVREIEEKIKRVIERDKKLVKKLEEDNRRVIKKDKDLVRRLEERTR

SEQ ID NO: 21691 - protein, 57 aa, Artificial Sequence
  Synthetic
SLKERLRDDAKRLLDEDRKVLEDLERRAKEINDRNEEIVKKLRDKVREILERIDREV

SEQ ID NO: 21692 - protein, 59 aa, Artificial Sequence
  Synthetic
EEVIRRILEELRELVERSERTVRDIERELDELIDKSRRDVEEIIKDLERELEELKRKTK

SEQ ID NO: 21693 - protein, 57 aa, Artificial Sequence
  Synthetic
RVREELEKAAEEVRRRDRRVLEELEKEVRRINEDNKRVHETSREVVERILETIDRRV

SEQ ID NO: 21694 - protein, 59 aa, Artificial Sequence
  Synthetic
EDVIRKIVRELEELVRESKETVDDIIRRLEELIRKSREDNRKIVEELKKLLDDLTREEK

SEQ ID NO: 21695 - protein, 57 aa, Artificial Sequence
  Synthetic
SLKETLEEVVKRVLETDKRLLEKNDRTVREVNERNRRVHEESRRAVERILEEIDREV

SEQ ID NO: 21696 - protein, 59 aa, Artificial Sequence
  Synthetic
EDTIRRIAKEADDLLEDSRRKVEDNSRRLKRLLEESKKSNEEIVRRLEDLLRRLKKESE

SEQ ID NO: 21697 - protein, 57 aa, Artificial Sequence
  Synthetic
SLKEELEEDVKRINDRNEEVLKRLREVAKKLLDDDRKLLKELKKVVEDVLRDVDREV

SEQ ID NO: 21698 - protein, 59 aa, Artificial Sequence
  Synthetic
AEVIKKILEELEKLIKDSEDTAREIIKELKELVERSKRKVEEILKELEDLLEELKRRAD

SEQ ID NO: 21699 - protein, 57 aa, Artificial Sequence
  Synthetic
SMEEKAEEVIKEVDEENKRLIEEAEKVIEDVEREDRRLVDELRKVIEKVERTIERDL

SEQ ID NO: 21700 - protein, 59 aa, Artificial Sequence
  Synthetic
KDVIEEIIERLRRHVEDSEEKIRRIIRRLEEVLKRSKEDIERIIEELERLLDEMRERAR

SEQ ID NO: 21701 - protein, 58 aa, Artificial Sequence
  Synthetic
DMDRKLKEEIKRAERRDKELVKDIERVIEEVLRANKELIERIEKVIDDVRREIEKRLK

SEQ ID NO: 21702 - protein, 59 aa, Artificial Sequence
  Synthetic
KDVIEEIIERIKDILRESEREIRRIIKELREHLKKSADRIEKIRRELERLLEKLEDDAR

SEQ ID NO: 21703 - protein, 61 aa, Artificial Sequence
  Synthetic
SEIEKILRELEEHIKDSEREHRELVERLRDHIRRSKEEHRDLIRKLEERIREVERRVRKDG

SEQ ID NO: 21704 - protein, 59 aa, Artificial Sequence
  Synthetic
KELKDRLKRVSEEHKRRIEDLLRRTKRVSERHREEIRKLLETTERAIKKARETIERLRK

SEQ ID NO: 21705 - protein, 61 aa, Artificial Sequence
  Synthetic
SEIDRLLERLEDHIRKSAKRHRDLVEELREHAERLKRDIERLLEELEKTVRDIEKEVRERG

SEQ ID NO: 21706 - protein, 59 aa, Artificial Sequence
  Synthetic
EDMKRKLEKVSEEHERKIKELLDRTKRASEEHDERVKRLLDELRRVLKEAEERLRELKR

SEQ ID NO: 21707 - protein, 61 aa, Artificial Sequence
  Synthetic
ERIDRIIKELEDLVDESRKRNDDLVRELKKHIKESKDEHDRLVEELDRFVEEVRKRVEKDG

SEQ ID NO: 21708 - protein, 59 aa, Artificial Sequence
  Synthetic
EDAIRKLEDVLRKVRETHERLLDKSRDVSRKHREDIKELLKKTKTVIDRVRKRIKELRK

SEQ ID NO: 21709 - protein, 60 aa, Artificial Sequence
  Synthetic
SEVERIEEELRREIEKVDRDNKKIVDEARRSIDELRKDVEDILRDLRRLVDEVEKMARRG

SEQ ID NO: 21710 - protein, 59 aa, Artificial Sequence
  Synthetic
EELLKRVEDVVDEVRKRLERIDEKTRKAVKEVTDRNDELLKRVREVVKEVRARLEEIRR

SEQ ID NO: 21711 - protein, 56 aa, Artificial Sequence
  Synthetic
SEKEKVDKVVKKVAKRIKDLLDEIKRVADESNERLERLLRRLEEASKRSKKKLKDD

SEQ ID NO: 21712 - protein, 56 aa, Artificial Sequence
  Synthetic
VDTLIKELEDRIDEVEKRIRELIERDKRLVEEVERRIAELIRRDERLVEELKKREE

SEQ ID NO: 21713 - protein, 56 aa, Artificial Sequence
  Synthetic
SEKEKLKDVVRDVERLIKELMERLERVHERTNREITRLLEDARRAMERSNKKLTDL

SEQ ID NO: 21714 - protein, 56 aa, Artificial Sequence
  Synthetic
VDDLLRRLKELIERVRKLIEDSIKELRDIVKEVKDRIKTLIERDKELVKRLEDRAR

SEQ ID NO: 21715 - protein, 57 aa, Artificial Sequence
  Synthetic
SEVDKLVRDLERHIEEAKRRVEELLKEIKKLVEDTKREAKKLLDTLRKKVEDVEREN

SEQ ID NO: 21716 - protein, 59 aa, Artificial Sequence
  Synthetic
EEMLRKMREVSERHKKTIDELRKELKKVLDEWRRRSEKIFEELDEVLKRVEERVKEVER

SEQ ID NO: 21717 - protein, 57 aa, Artificial Sequence
  Synthetic
SEVDELVRRLREHIRRAKERVEELIKRIKTLAKETTDRARKLIEDLKRHIDDARRKN

SEQ ID NO: 21718 - protein, 59 aa, Artificial Sequence
  Synthetic
REVLKKIKEVSDEHRKEIERLRKRLEEVLREWEDTSREVLERLKEVSKRHRDEIREVAR

SEQ ID NO: 21719 - protein, 57 aa, Artificial Sequence
  Synthetic
SEMEDLIRRLREHIEDVRRKVEELIRELEDHIRRAEESVKKREDDLRRHIEEVRKRN

SEQ ID NO: 21720 - protein, 59 aa, Artificial Sequence
  Synthetic
KEVLDEARRVSKEHKDTLEKLLRKAEEASERHKREIERLLKELKEVSEEHRRRIDEVRR

SEQ ID NO: 21721 - protein, 55 aa, Artificial Sequence
  Synthetic
SEVEELIEDLKRHLKEVADRVEELERELRKHLEEHHRRVREIIRRLEDLLRKAEE

SEQ ID NO: 21722 - protein, 59 aa, Artificial Sequence
  Synthetic
EDLKRRIEKVSRDHERTVEKLVRDLERVSREHERTVKENKERIKKVLDDARKRVDEVKK

SEQ ID NO: 21723 - protein, 59 aa, Artificial Sequence
  Synthetic
SEVEKLVRELEDVLRKIERKVRELSKDNKRVLDENKKRVEDVSRDNERAMREIEELRRK

SEQ ID NO: 21724 - protein, 55 aa, Artificial Sequence
  Synthetic
EELKKVLEDVKREVEKLLEEIKRSLEEARKTVKESNDEIRESLERLEEKVRRIEK

SEQ ID NO: 21725 - protein, 59 aa, Artificial Sequence
  Synthetic
DEVKDLVKRLEEVIKRIDEVVKEVDRRNREVLERNRELVERSIRELREVLDRIRRRKKD

SEQ ID NO: 21726 - protein, 55 aa, Artificial Sequence
  Synthetic
SELDKVLEDVKRKVEEILRRIKRSLDEVERDVRRSNEENKKVTKEVREAAEEIKR

SEQ ID NO: 21727 - protein, 59 aa, Artificial Sequence
  Synthetic
DEVEELVRRLREVLEEIRELVERVNDRNRRVLEENRELVTRSIEELRRALERIERLSKD

SEQ ID NO: 21728 - protein, 55 aa, Artificial Sequence
  Synthetic
EKLKKVLEEVERRAKKLLRDIEESLRRVAREVERSNEENKKVTKEVADAVREIER

SEQ ID NO: 21729 - protein, 57 aa, Artificial Sequence
  Synthetic
DEEKKARDVLERWRKRSEDLLRKAEDVLREWRERSERSFKRLRDVLEEARKRVEELN

SEQ ID NO: 21730 - protein, 55 aa, Artificial Sequence
  Synthetic
DELVREIEEVVKETEKRVEELIKEIREMVKKNEREVREIERRLEETLEKIDRDRK

SEQ ID NO: 21731 - protein, 57 aa, Artificial Sequence
  Synthetic
SEEEEIEKALRDWREELKRLLETIERLLREWKRRVEELKKRIEEALKELKKILDDKG

SEQ ID NO: 21732 - protein, 56 aa, Artificial Sequence
  Synthetic
VEEVKKKLEKEIKKNRENVDRLRRRLEEEVKRNERSVEEIKRRLDEIARELDERKK

SEQ ID NO: 21733 - protein, 57 aa, Artificial Sequence
  Synthetic
SEDEEIKEALKEWRDEVRRLEEKIRRVLEKWERDVRRLKEEIKKSNEDLRRRLEEKG

SEQ ID NO: 21734 - protein, 56 aa, Artificial Sequence
  Synthetic
VEEVKKRLKRLIEENRKNVKRLEERIREAVKKNEKSVEDSERENRDIARELDEKRK

SEQ ID NO: 21735 - protein, 60 aa, Artificial Sequence
  Synthetic
EEVERLKERLERLSERSKEIAKRVHEENKKLSEESRKLVEDVHRENEEAAKRLEDVARRN

SEQ ID NO: 21736 - protein, 59 aa, Artificial Sequence
  Synthetic
RELLERLRRVLEEHREVNERILEEIKRSLDEHKDTNRKLLEEIEKSLRDLEEIVRRLEK

SEQ ID NO: 21737 - protein, 60 aa, Artificial Sequence
  Synthetic
REIEEIEKEVRDVSKESEDIVRTVHDENRRASERSRELVKRVDEENRKAVEDLERVAREN

SEQ ID NO: 21738 - protein, 59 aa, Artificial Sequence
  Synthetic
DELLRRVRKLLEDHKRVNERLLEEIEKSLKRHREENERLLEEIRKSLEDVERVVEEIKR

SEQ ID NO: 21739 - protein, 60 aa, Artificial Sequence
  Synthetic
SELEELEKRLRKAVRDLEEIVDRVRKDLERASDDSRRIVEEVHRENRKVAKELKEVRDRN

SEQ ID NO: 21740 - protein, 59 aa, Artificial Sequence
  Synthetic
EELLEALERLLRELEKIVRKLLRELEEMLRRHEKTNRELLERIRRSLEELAKIVEDLET

SEQ ID NO: 21741 - protein, 60 aa, Artificial Sequence
  Synthetic
DEIEEIKKELDELSKRSEKIVRDLERELREASKESERLVRKVHDDNRKALEELRDVRRRN

SEQ ID NO: 21742 - protein, 59 aa, Artificial Sequence
  Synthetic
DELLKEVRRALEEHERVNRELLERIRRVLEEHKRVNEELMREIDRSLKELAEIVKRLKD

SEQ ID NO: 21743 - protein, 60 aa, Artificial Sequence
  Synthetic
DELEELRKELKKMVDEIEEIVRRVDKENRDASRESEELVERIVEEVRKAVTELKELKKRN

SEQ ID NO: 21744 - protein, 59 aa, Artificial Sequence
  Synthetic
DELLKEVRKALERLKEEVKRVLEDIRRSLEEHRKVNERALRRIEEVLRDLERIVEEVKT

SEQ ID NO: 21745 - protein, 60 aa, Artificial Sequence
  Synthetic
SEVERLKDELRKASEELKKEVEEIEKRLREMSERSRKLVEELKRTLKEIEKELKDIVRKD

SEQ ID NO: 21746 - protein, 59 aa, Artificial Sequence
  Synthetic
DRLKEEVERVLREHEKSLERLRERLKELLERHHKTNEELLREIKEALERLEKIVKDLTD

SEQ ID NO: 21747 - protein, 60 aa, Artificial Sequence
  Synthetic
DEVEDAERRLREMSERIEDLVRRVEERLRRMSEESKKLVEDVKRENDKSVEELDRIVRRD

SEQ ID NO: 21748 - protein, 59 aa, Artificial Sequence
  Synthetic
DRLKERLEKLLRDHRRSVEEVIKKLDRLLKEHHKVNEKLLRDIDKSAKEVKKVVEDKTR

SEQ ID NO: 21749 - protein, 60 aa, Artificial Sequence
  Synthetic
SEVEEAEKELREMSKTSTRLVEELEERLRRASETLKKLVDDVKRELDKRLEDIDRRVARN

SEQ ID NO: 21750 - protein, 59 aa, Artificial Sequence
  Synthetic
DRLKERVDRLLEEHHKVNKRLLERIEEVLRRHETTLRELIKEIDKLLRDLKKRIDDVKK

SEQ ID NO: 21751 - protein, 60 aa, Artificial Sequence
  Synthetic
DEVREVKKELKKIAEELRKLIEEVREELRKMSKRSEELVRELKKRNEKSVRDLERIVRKD

SEQ ID NO: 21752 - protein, 59 aa, Artificial Sequence
  Synthetic
DKLKEELKEALKDLERELKELIEELKRLLDEHHKRNEDLLREIDKSVRKVEEDVRRLKK

SEQ ID NO: 21753 - protein, 60 aa, Artificial Sequence
  Synthetic
SEVDEVRKELERLVREIKKLVEDSKRNLDRLSKELEERVRDLERDARRLVKELRDLLKEN

SEQ ID NO: 21754 - protein, 59 aa, Artificial Sequence
  Synthetic
KEVRDDVRRLIREVDEELKKAKEDLDRAHEEHEKSTERLRERIKEVVDRVREDIERTKN

SEQ ID NO: 21755 - protein, 56 aa, Artificial Sequence
  Synthetic
DEERRIEKVLKEWEKRTRDLARELERVNREHKKTSEDVLKKLEEINREVRRVVKEE

SEQ ID NO: 21756 - protein, 56 aa, Artificial Sequence
  Synthetic
VEKLRRLIEEVIREDERRVERVKRNNKRLSEETEKLVEDVRRNNERLVKEVRDRSR

SEQ ID NO: 21757 - protein, 56 aa, Artificial Sequence
  Synthetic
SEEEEIKKVLDEWRRRTEELRKDLDRVLEEDRRSVEEVKRRLDKVNEELRRRIDEL

SEQ ID NO: 21758 - protein, 56 aa, Artificial Sequence
  Synthetic
VERAKEEIKKVIKEDEDLVRRVRKYIEENSDELRRLVEEARKNNTRIAKEAEDTSR

SEQ ID NO: 21759 - protein, 56 aa, Artificial Sequence
  Synthetic
SEKEEIDKVLKEWEEMTRRLVEELKKSHDEDRESVKRLLERLRDVNRELKEIIDRA

SEQ ID NO: 21760 - protein, 56 aa, Artificial Sequence
  Synthetic
VEKAKETVRKVIKEDRDLVREFKKYNEENSDRMRKLVKDIKENNRRIVEEARERSR

SEQ ID NO: 21761 - protein, 56 aa, Artificial Sequence
  Synthetic
SKEEKLREALKKVRKDVKDLERHIDRSVKRNKEEVDKAKRELERSLEELRRRLEEL

SEQ ID NO: 21762 - protein, 56 aa, Artificial Sequence
  Synthetic
VEELLERLERTLRRMREKVRKLDKENKDHTEKVKEDVKRVHDENDKVREDVDRKDK

SEQ ID NO: 21763 - protein, 60 aa, Artificial Sequence
  Synthetic
REVEELVKEIERVLEETKKRSEDTKREVEKVLEDTKRLVERLRKTLEELLRELDKRVRSG

SEQ ID NO: 21764 - protein, 59 aa, Artificial Sequence
  Synthetic
EELRRTLEKVLREWRDVNRKVNDTDRKVLEDWERVNRTVNEELKEVLERAKEDIDRVAT

SEQ ID NO: 21765 - protein, 60 aa, Artificial Sequence
  Synthetic
DEVERLVEEIKKRIDETRKLLEELKKRIRKVLEETKDLVRRLLKRLRELLKELEERRRRG

SEQ ID NO: 21766 - protein, 59 aa, Artificial Sequence
  Synthetic
EELRRELKRVLDEWKKANDEVRRAMEEILKEWEEVNRKVNKDLRDVLEEVKERLREVAK

SEQ ID NO: 21767 - protein, 60 aa, Artificial Sequence
  Synthetic
SEVEKLKKRLRDLLEELKRLSRRTKEDVRRVIKETRDRSKKTKEELEKLLREIRELRKRG

SEQ ID NO: 21768 - protein, 59 aa, Artificial Sequence
  Synthetic
EDLRTEIKKILEEVKREIDRVRETDEKVLRDWKKANDEVRETDREVLRKIREDLKEVAR

SEQ ID NO: 21769 - protein, 57 aa, Artificial Sequence
  Synthetic
RERETIEKVLDENRKSLEEVTETVKRVLDRWDETLKRLEEEVRRVNDKTRKVLEDLL

SEQ ID NO: 21770 - protein, 56 aa, Artificial Sequence
  Synthetic
VKELKKRVKELSEKLREVLEELERRVREIVKRNKETVDESRKRNEELIKRAEDAAK

SEQ ID NO: 21771 - protein, 60 aa, Artificial Sequence
  Synthetic
SEIDEVRKRVEKHSRDAKRLVDELREKNDRAIKTLERLLRELEKRNKKVIRDLEDVRTKN

SEQ ID NO: 21772 - protein, 59 aa, Artificial Sequence
  Synthetic
EDMVRELRRVLKENDESVRRLKREIEEVHKETERVVKEVLEEIRRVDEELKDVARKVET

SEQ ID NO: 21773 - protein, 60 aa, Artificial Sequence
  Synthetic
REIEEVIKELKRHSEELEKELDRLRRENKEAIRTSKKLVEDLRRENTRAKEELEDVKREN

SEQ ID NO: 21774 - protein, 59 aa, Artificial Sequence
  Synthetic
ERALERLRRVVRENEESVERVLKKIDDIHEETKRVSDRSEKEIEDVDRDLKRKVEEVEK

SEQ ID NO: 21775 - protein, 63 aa, Artificial Sequence
  Synthetic
REREKIKRILDELRKRVEELNRRNEELLRRLDKVVRDVNRTNKRLLEKLRKVADDVRRKLKDE

SEQ ID NO: 21776 - protein, 56 aa, Artificial Sequence
  Synthetic
VDKVERTVEEIEKELTRLVEESEKEVKRIIEELKELLERSRKSVEDIIREVRKLAE

SEQ ID NO: 21777 - protein, 60 aa, Artificial Sequence
  Synthetic
SEEEKLDRLLEELKKVAEEVNRENEKLLEDLERVVRDLNEKNKAALKKLEDAVRRLKEAI

SEQ ID NO: 21778 - protein, 56 aa, Artificial Sequence
  Synthetic
VDRVEERLREIIKTLRKLLEDSKESVRKIIEELKRLVDRSIEDLERIIKELEDKVR

SEQ ID NO: 21779 - protein, 60 aa, Artificial Sequence
  Synthetic
DRERRIETVLRKLKKVVEEVNRRNEKLLDDLRKVVTRLLEEDRRLLEKLRRAAERLKEEL

SEQ ID NO: 21780 - protein, 56 aa, Artificial Sequence
  Synthetic
VTRVKEKIEKIIEELKKLLKDSKKRVEEIIRELEKLVDDSRREVEEIIKELKDRSR

SEQ ID NO: 21781 - protein, 60 aa, Artificial Sequence
  Synthetic
DMREELERILKTLRDVSRESRRELKRLLDENEKTIREVKKRVDEILEKLRKVIDDVRRQG

SEQ ID NO: 21782 - protein, 59 aa, Artificial Sequence
  Synthetic
KKVVDEVDKEIRELIRKDEEIVKEVAERVKKNSEDLRRLLEKARREIEEIIKELEERRR

SEQ ID NO: 21783 - protein, 60 aa, Artificial Sequence
  Synthetic
DEDEIVRDVIRRLDEVLKKLEKTNTELDEELKRVVEELRKVNRTVDEELKRVLDELAKRI

SEQ ID NO: 21784 - protein, 55 aa, Artificial Sequence
  Synthetic
DKLVKDLKRVLDKLEESSRRMLKKLSDALRELEKSSDKVVKDLRKVLKELREEVK

SEQ ID NO: 21785 - protein, 60 aa, Artificial Sequence
  Synthetic
DEDERVEELLRELEEVLDRLAKLNKKLDERNKEVAEESKRLNETVDRELKEVLKRLEEKL

SEQ ID NO: 21786 - protein, 55 aa, Artificial Sequence
  Synthetic
SELVERIRRELERLKRSSEEVVKKLTEELKKDKKSSEEVVKDLRRALRELERAVD

SEQ ID NO: 21787 - protein, 60 aa, Artificial Sequence
  Synthetic
SELEKVKEDIRRLLKRLKEDIKRIKDEIDRLLEELKRHLKEVEEEVDRILEELKDLKRRG

SEQ ID NO: 21788 - protein, 55 aa, Artificial Sequence
  Synthetic
EKLERVKEDVERVLEEYRKRSEDLARRVEKVLREYKKRSDELEKRVEDVIKEVAD

SEQ ID NO: 21789 - protein, 60 aa, Artificial Sequence
  Synthetic
KELEEVARKIDEELKKLDKNIRDIADEIRRILEELEKDLREIEKRIRDILRRLEDLKRRG

SEQ ID NO: 21790 - protein, 55 aa, Artificial Sequence
  Synthetic
DELKTVEDKVRKALREYEEKTRKVKKDVDEVIKKYKTDSDRVLDEVEKALREVER

SEQ ID NO: 21791 - protein, 59 aa, Artificial Sequence
  Synthetic
RVEEKLKRVSDELKRAVDESNKKIEELLERLKRVHDETNKEITEILRELKEVVDKARED

SEQ ID NO: 21792 - protein, 59 aa, Artificial Sequence
  Synthetic
DELVEDIERKIEELIRRDDDLVRRAEEEVEKSIRELRRLVDEVRKEIKKIVKKIEDDVR

SEQ ID NO: 21793 - protein, 60 aa, Artificial Sequence
  Synthetic
SREDKARELLRELEKVDDDHRRRVRELLERLKKVLEDHRRAVKDIIKRLDDELKRIKEED

SEQ ID NO: 21794 - protein, 55 aa, Artificial Sequence
  Synthetic
EEVAKEVKDIVREVEDHLRRVEEEVRRIIREVEEHIRDLERRVRELLEELKRRSK

SEQ ID NO: 21795 - protein, 60 aa, Artificial Sequence
  Synthetic
SEEEKVRRLKEELRRVIEKHKKDVKEIEDRLREVDDRHRREVKKLIEELKKVLEDAKRRK

SEQ ID NO: 21796 - protein, 55 aa, Artificial Sequence
  Synthetic
EEVAKRVKEIIEKVERHITEVKKRAEELVEEVERHIRELKKRVEDLVEEIERDTK

SEQ ID NO: 21797 - protein, 61 aa, Artificial Sequence
  Synthetic
DEKETAEELLRRIEKVIKRLEDTMRKLNKKLKEAIERHHRTAKKLLDDIERVIREVEKDRG

SEQ ID NO: 21798 - protein, 56 aa, Artificial Sequence
  Synthetic
REELEDDVRRIIEEIDRLLRESEEDHEDLIRRLKRSLEELKRLAEDIIRKLSEDRK

SEQ ID NO: 21799 - protein, 61 aa, Artificial Sequence
  Synthetic
REKEAAKRILDRIEKVIRDHHREAKRLNDELEKVIREHHETVKELLKRIKEVIDKFKKDKG

SEQ ID NO: 21800 - protein, 56 aa, Artificial Sequence
  Synthetic
VEELEETARRIIEKLKKSLEDSKRDHERLKKEIEDSLKRLTELVKKIIEEIERDRK

SEQ ID NO: 21801 - protein, 61 aa, Artificial Sequence
  Synthetic
DEDEEARRLLEEIRKVIEEAEEEAKRLNERLRRVIKEHHRKVKELLDEIERVIEKVLRARG

SEQ ID NO: 21802 - protein, 56 aa, Artificial Sequence
  Synthetic
VDELRERVREIKEKLRKDLKDSEDDHRRMEEEIKKSLERLERLVREIIKDLEEKLR

SEQ ID NO: 21803 - protein, 61 aa, Artificial Sequence
  Synthetic
KDEERAKRLLDEIERVIRRHHKTARDLNRELERVLKEHHDTARKLLEDIKKAIDDLKRTRG

SEQ ID NO: 21804 - protein, 56 aa, Artificial Sequence
  Synthetic
AKELEDKVKEIIDRIEKSLEESDKNHKKLIRELEKSLDDLRREAKEIIDDAREKAK

SEQ ID NO: 21805 - protein, 60 aa, Artificial Sequence
  Synthetic
SAAERAEEVLRKLRESLERHKKVNKDLLEEIERSLREVAKDVDRVLKDIKRVLDELKRRR

SEQ ID NO: 21806 - protein, 55 aa, Artificial Sequence
  Synthetic
DEVEELVRRVHRENEKFSKESEDLVREVHERNKELVKRIRKILEDATRELEKAAK

SEQ ID NO: 21807 - protein, 60 aa, Artificial Sequence
  Synthetic
DMKEEAEEVLKEIEEVLKEHRDINRRLLEEIKKSLEDLSREVERVLDEIRRLLKRAVEER

SEQ ID NO: 21808 - protein, 55 aa, Artificial Sequence
  Synthetic
EEVRKIVEDLKKRLKELSEKSERIVRKVHRDNERVVREIRDIVRRLKKRLEDATR

SEQ ID NO: 21809 - protein, 60 aa, Artificial Sequence
  Synthetic
SAKEKVDEVLRRIKELLDRHKKVNEEILEEIRRSLEEHREVNERLLETIDRLLKELKRSR

SEQ ID NO: 21810 - protein, 55 aa, Artificial Sequence
  Synthetic
EEVEEIMRRAEEELRKLSKESRELVKRLHERNEEMSRRSKKIVDEAKKELEDAER

SEQ ID NO: 21811 - protein, 60 aa, Artificial Sequence
  Synthetic
SAEEELDRLEKELDKLLKEHHEENKRLLEEIDRVLKEHEETLRRLIKELREVLKEVKEKL

SEQ ID NO: 21812 - protein, 56 aa, Artificial Sequence
  Synthetic
VEKLREDVERVKRELEDLTRKSEELVKRLKDTLRRVSEELKRRVDEAKKEAREVER

SEQ ID NO: 21813 - protein, 60 aa, Artificial Sequence
  Synthetic
SAEEELKRLLEENERVTEEHHKRNRDLLRRIDEALRRHEKTLEDLIRELDRVLRELERRL

SEQ ID NO: 21814 - protein, 56 aa, Artificial Sequence
  Synthetic
VDDLRRIIEESRRRHEELTKESEKLVREVEDILRRLSEELAELVKRVKDKLDEDAK

SEQ ID NO: 21815 - protein, 60 aa, Artificial Sequence
  Synthetic
SAEETLKRLAERIRKLLEEHRETVKRVIDRLDKVLRDHHRENKRLLEDIDRVLRRLEESL

SEQ ID NO: 21816 - protein, 56 aa, Artificial Sequence
  Synthetic
VEDLDRRVKEVERRLREMSKTIEKLVKDIERELKEASEESRELVERMKRELTEAEK

SEQ ID NO: 21817 - protein, 60 aa, Artificial Sequence
  Synthetic
REIEEILKEIEKSLRDLEEEVRRILEEIKKSLEDLRESMERIVEEVDRRLRTLKEVFDRG

SEQ ID NO: 21818 - protein, 59 aa, Artificial Sequence
  Synthetic
DRVRRIIEKLEEDLRRVNKKIKETLEEAAKRLEDADREIEKILRDLARKIRKVLEEIKK

SEQ ID NO: 21819 - protein, 60 aa, Artificial Sequence
  Synthetic
SEVEEIERRIEKSLKELRERLEEAEKRHEELLERLEREIDRIEKELRKDLKRLRDMTRRG

SEQ ID NO: 21820 - protein, 59 aa, Artificial Sequence
  Synthetic
ERVKKEIDRLEKRLEEVNEEIKKRLKELAERSRRVLERIKDRIRRAAEELKRVLDEVRT

SEQ ID NO: 21821 - protein, 60 aa, Artificial Sequence
  Synthetic
SEIEEILKRLKELLKELKERNEDILRRVEKSLKDLRKKLEEIVRDLRRLLEELREMVKRG

SEQ ID NO: 21822 - protein, 59 aa, Artificial Sequence
  Synthetic
DRVREIIKTAEKELEKALRTSEDIDRRLEERLEKVNKEIREELRRAEEEIKRVLEEVKR

SEQ ID NO: 21823 - protein, 60 aa, Artificial Sequence
  Synthetic
DELDRIRKEVKRISDKNRRHVERLDEEVRKLLEELRKHLEDLTREVERLLRELKEVKKEG

SEQ ID NO: 21824 - protein, 59 aa, Artificial Sequence
  Synthetic
EEMRTKVEELRKRLEESLEEHKRAADELRKRLKKVLEEHEKRVRELEEELRRVLKEAED

SEQ ID NO: 21825 - protein, 60 aa, Artificial Sequence
  Synthetic
DELEELRKLVEEISRENREHLKKLKKLVEDLSRENEKHLRDVDKRVKELLEDLERLTRRG

SEQ ID NO: 21826 - protein, 59 aa, Artificial Sequence
  Synthetic
EDVERELRRLKKELDKSLKEHRTTLERLEEELRKSNKEHRDRVKELREELEKVLRDAKR

SEQ ID NO: 21827 - protein, 59 aa, Artificial Sequence
  Synthetic
SMLDEARKEVKELKDRVERASEKLEDNARRNVEKLERVSEELEREVKRLLDEIEEVKRR

SEQ ID NO: 21828 - protein, 56 aa, Artificial Sequence
  Synthetic
EETLKELERRIREVLKKHDKTLRDLERRIREVNKRHKDVSDRLAERIKKVIRELER

SEQ ID NO: 21829 - protein, 59 aa, Artificial Sequence
  Synthetic
DKEKELEREVDELLKRLEEHSKRVDKTVEDVHRRNEEALRDMERKVREVVEKLKEVKER

SEQ ID NO: 21830 - protein, 55 aa, Artificial Sequence
  Synthetic
EEVDRLRRELREVLKRNRESVERAEEKLKKSVKELDERVKELEEELDRALDELRK

SEQ ID NO: 21831 - protein, 60 aa, Artificial Sequence
  Synthetic
SEVEKLERDVRELHKDNKRHSDELDREVKKLLEELRRALEELKEKVERLTRRLEEVKRRT

SEQ ID NO: 21832 - protein, 55 aa, Artificial Sequence
  Synthetic
KEVEELKRRIDRSVEENEDSIRRLKEEIKRIVDEVRRVVEKLIKEIKDAVKKLRD

SEQ ID NO: 21833 - protein, 59 aa, Artificial Sequence
  Synthetic
DELEELKRRVEELEERNKDHSRKMRETVERVKERLDRHSKEMEKEVRKVVEDIKDVKRK

SEQ ID NO: 21834 - protein, 55 aa, Artificial Sequence
  Synthetic
REVDELKKEIERADKENKDSIEELERELDRVLKENEKSIRELEKELDDVLDEADK

SEQ ID NO: 21835 - protein, 57 aa, Artificial Sequence
  Synthetic
SEAEKLLEENRRELEKVKRDAERLNDEIRERLKEIEDKLKTLNDEIRKLVKEMEDRN

SEQ ID NO: 21836 - protein, 56 aa, Artificial Sequence
  Synthetic
EEILRTIADDNRRVLEEIKKIIKHSRDELERVKRDIDRIVKHSVKLLEDVLRRLRK

SEQ ID NO: 21837 - protein, 60 aa, Artificial Sequence
  Synthetic
DEEEIVKRIEDDARRIIEEVKEVLRRIRDLNERILREAEEVLKEIREINRKVLEDLRRDG

SEQ ID NO: 21838 - protein, 55 aa, Artificial Sequence
  Synthetic
ERVLKRLRDELDKLREDLERILRRNKKLLDELRELLERSRRENEKLVEELKRKAK

SEQ ID NO: 21839 - protein, 59 aa, Artificial Sequence
  Synthetic
SEAERIEEEVKKLLKDVKKKLEELKESSKRVVEELDKVLKELKESSDRLAKEIKKALDD

SEQ ID NO: 21840 - protein, 56 aa, Artificial Sequence
  Synthetic
KDVLEKLRELVKRLIDDLRRVVEELEETNERLDRKLEDVLKKLRETNEKTLRELRK

SEQ ID NO: 21841 - protein, 59 aa, Artificial Sequence
  Synthetic
SVREDLKRVVEDIRRIVKEVHERNREASKRSEDLVREVHERNERIARELKKIVDDLRRV

SEQ ID NO: 21842 - protein, 56 aa, Artificial Sequence
  Synthetic
RRVLEEVRKEVEKVLREIEKSLRDHERENKRLLEDIERSLRELEKTVEKLKRDIRR

SEQ ID NO: 21843 - protein, 59 aa, Artificial Sequence
  Synthetic
SAREALKEAVKEIERIVREVHDRNRRASERSEKIVRDVHRRNKKLTDESKDLVDKARRI

SEQ ID NO: 21844 - protein, 56 aa, Artificial Sequence
  Synthetic
KRVLEEVAKRVEEVLKRIKDSLEEHRRVNDKLLKDIEKSLRDHERANEKLLEDLRK

SEQ ID NO: 21845 - protein, 57 aa, Artificial Sequence
  Synthetic
DELEELLKRIEDVIRRVEELLDELLERHRKVSKESNERLEELLRRHEKVSEEVKREN

SEQ ID NO: 21846 - protein, 59 aa, Artificial Sequence
  Synthetic
EEVEKRVREVLKEIEDRAREVEKRARDSVRRNREELERLERDVRRSLKKLRDDLERMRR

SEQ ID NO: 21847 - protein, 61 aa, Artificial Sequence
  Synthetic
SKVEKLLEDIKKLVKEVSDKIEELLKRLHEVVREIAKAVRDLIRENKRVVDDIVKKVRERG

SEQ ID NO: 21848 - protein, 59 aa, Artificial Sequence
  Synthetic
KEAEDDARRIIEEIERLLREVKKYIEEHIKRLRTVLKKLAEDSKKHLDELRELLRRLEK

SEQ ID NO: 21849 - protein, 61 aa, Artificial Sequence
  Synthetic
SELETLLTDVERLLDESRRVAERVLKEVKELLDEWEKRHKELADRIRELLRRVEEEMKRAN

SEQ ID NO: 21850 - protein, 60 aa, Artificial Sequence
  Synthetic
DEEVRREATDLRREIKEHTDEVEKKLEELAREIEELLERSERSAEELRKEIEKLLEEIRR

SEQ ID NO: 21851 - protein, 60 aa, Artificial Sequence
  Synthetic
SEIEKLLEDFKKRIEDIKRRLERYLEEVRKRVEKVKRELERALEESKRTVDEVKKEIDRA

SEQ ID NO: 21852 - protein, 55 aa, Artificial Sequence
  Synthetic
DEVRKEIRKLLDDIRRVVEKVKRDNERLNRDLNRRVREVIRESEKLNKRLEEAVR

SEQ ID NO: 21853 - protein, 58 aa, Artificial Sequence
  Synthetic
SESETLEKELKELKEEADKLIEDIRRRLEEVARRVERNVTESERTLEELLRRAREKKK

SEQ ID NO: 21854 - protein, 55 aa, Artificial Sequence
  Synthetic
RRVKEEVKRVLEEIERALRTVLKEVRDLLKRLEELHREVLDKNRRVLKAISDEAK

SEQ ID NO: 21855 - protein, 60 aa, Artificial Sequence
  Synthetic
SEDEKVKKDLDELRDRVRKNIERIRRKLKKLLDEARDNVRRSEETLRRLARRVEKIKKDK

SEQ ID NO: 21856 - protein, 55 aa, Artificial Sequence
  Synthetic
RSVKEELRRVLEDLKRLHEEVSKRVEDALREMKELHDRVLKRNKDVLRELKERAQ

SEQ ID NO: 21857 - protein, 60 aa, Artificial Sequence
  Synthetic
SLEEIVKDILRRIKTKADEIKEKVDRSLREIEELVKEIKKEVDDSLRDIERVAEELRREG

SEQ ID NO: 21858 - protein, 55 aa, Artificial Sequence
  Synthetic
ERLLRDVRRILEELRDLVRRLHEDNKRLDEDLNRKVEKLKRDNEDLNKKMRDRAE

SEQ ID NO: 21859 - protein, 60 aa, Artificial Sequence
  Synthetic
SEKEEADKKLKKVMDDLREILRRLLETLKRVIERSEEVLKRLDDRNREVLEEIKRAIERL

SEQ ID NO: 21860 - protein, 56 aa, Artificial Sequence
  Synthetic
EKEAEETVRRMKELVDRIRKKAEEDVKKLREDSKRTADRSKKNVEDLKRRLDELAK

SEQ ID NO: 21861 - protein, 59 aa, Artificial Sequence
  Synthetic
SEIEELVRRLERKLEEHKKMVDKYREDLKRTLDRVNELSKDYIKKLRDILEKAERLVRR

SEQ ID NO: 21862 - protein, 55 aa, Artificial Sequence
  Synthetic
EDLRRIAERVLREAHRTAKDLHRDSERVREEIKKSVDRVHEESERVLREIRKLKK

SEQ ID NO: 21863 - protein, 60 aa, Artificial Sequence
  Synthetic
SIEEEVRKIVDDIRRSSEELEKSVKRVVEEIAESSKEEKDRVKRNIEEIRKEIDKLRRDG

SEQ ID NO: 21864 - protein, 59 aa, Artificial Sequence
  Synthetic
KDVLEKLKRLLDKVVRDSEDVIRKLEERLKKVVDESKEVLKELEELHERVMREVEETIR

SEQ ID NO: 21865 - protein, 60 aa, Artificial Sequence
  Synthetic
KIEEDIRRELTKILDKLRKLLEKAKKNVEDIERSSRDLKRRVDETIEKIKDELRKLERDG

SEQ ID NO: 21866 - protein, 59 aa, Artificial Sequence
  Synthetic
EEVLERAERELRRVMKEVEKVLREIEELHRRVAETSKRVIDELRRLLEKVFKEFEDAVR

SEQ ID NO: 21867 - protein, 61 aa, Artificial Sequence
  Synthetic
SEVDEDLKRLEDRVREYEDRVREDIRRLEEDLKRLRKRIEDSIEEMRRTLEEVKEDVRREG

SEQ ID NO: 21868 - protein, 59 aa, Artificial Sequence
  Synthetic
RDRLTKLREVLERLEKRIREIDEEIKRVLERVEKEIRDALRKIEKVNEDVEKALRDILR

SEQ ID NO: 21869 - protein, 59 aa, Artificial Sequence
  Synthetic
SLEEEIEKVIRKLKEVVERINERNKRALDKLRKVVEEVKDALRRTNEELKKVVKEVERR

SEQ ID NO: 21870 - protein, 59 aa, Artificial Sequence
  Synthetic
KDDVRRLKREIEELIKRIDDKIRKLIRRHEELVREIREELKKHEERVKDVLRKLEKLAE

SEQ ID NO: 21871 - protein, 57 aa, Artificial Sequence
  Synthetic
SEVEKLKKEADEESERNKDEVRKLEKESKENADRIRRHLEEHLKRSDENVKRVKDAK

SEQ ID NO: 21872 - protein, 55 aa, Artificial Sequence
  Synthetic
EEMLRRLEELLRENKKRNKEVLDRDRELLRELDEEVDDVLRRDKELLEELERRLK

SEQ ID NO: 21873 - protein, 61 aa, Artificial Sequence
  Synthetic
SEVDEVLERIERLADDNRRKAETVLRKIARLLEELKKHSEDVNRKIKELVKELEDEVRRAG

SEQ ID NO: 21874 - protein, 59 aa, Artificial Sequence
  Synthetic
RELLERVLRRVEKKSEDHKRKLEEAERRVDKNREDHERRNEELLRRVEERVEDVKRRIK

SEQ ID NO: 21875 - protein, 60 aa, Artificial Sequence
  Synthetic
DEVKEVLKRIKDLLDELRRHSEKVNRDVERLLEELARNSEKVNREIRRLLDDLRRLVEEK

SEQ ID NO: 21876 - protein, 59 aa, Artificial Sequence
  Synthetic
RDDLERILREVDKKIKDLKRENERMLEEVERNAKEHKDRDREELKRVKEDLDRLRERLR

SEQ ID NO: 21877 - protein, 58 aa, Artificial Sequence
  Synthetic
KDAEELEKEVERESRKNEESIRRIREEVDKLSKDNDRKLKEIEKEVEDLRRRVDERRK

SEQ ID NO: 21878 - protein, 55 aa, Artificial Sequence
  Synthetic
EKLLDKIRKVVKENEERMDKLLEDIERVVRENIKKNKEVLERARRVIERLEEKIK

SEQ ID NO: 21879 - protein, 58 aa, Artificial Sequence
  Synthetic
DEDKKLEKDVRDKSEDNKRRLEEIKKKVEDASRENERKIEEIKRRVEEKAEEVDRARK

SEQ ID NO: 21880 - protein, 55 aa, Artificial Sequence
  Synthetic
EELLKTATELVTRNRTENERVLREAERVVKENLRRMDELLKDIRRVIEELERRIK

SEQ ID NO: 21881 - protein, 56 aa, Artificial Sequence
  Synthetic
EEVERSLKKLEDDIRRIERELEEMVRKSKREIDKLVRDLEEMLKDSRRKLEKLRKD

SEQ ID NO: 21882 - protein, 56 aa, Artificial Sequence
  Synthetic
EEAIRELERLLEELLRKIEEVIKDLRRLNKELDEEIKRVIDEARRLNKELEDDLRR

SEQ ID NO: 21883 - protein, 60 aa, Artificial Sequence
  Synthetic
SKVEKILKDIKRLLDELRKKLKEVKDRLDEINEELRETLKRSLDRNRKINEELKDKLRRR

SEQ ID NO: 21884 - protein, 55 aa, Artificial Sequence
  Synthetic
DEVLKRVEEEIRRLEEELDRTLERSKREVEKIKREIERTNRESERAVKEIDDRER

SEQ ID NO: 21885 - protein, 61 aa, Artificial Sequence
  Synthetic
SKDEEVLKTLRRILEELRDVHRRNLEDNKRITDRLREIHERNLRDNRRITKELEEVARRDG

SEQ ID NO: 21886 - protein, 55 aa, Artificial Sequence
  Synthetic
DEKREEVKKEVDETRERNERKNRRSREDVKRVEDRNRDANRKSRKEAEDVKRRLT

SEQ ID NO: 21887 - protein, 61 aa, Artificial Sequence
  Synthetic
SKVEEVLKRLREILKELEEVHKENKDDVKRILRDLEKTHKDNLDDNRRITEKLKRVVERDG

SEQ ID NO: 21888 - protein, 55 aa, Artificial Sequence
  Synthetic
DEEREKVERRAKEARDRNKRKNERVKEEVKRVKDRNKKKNDESKETVRKIEEDAT

SEQ ID NO: 21889 - protein, 57 aa, Artificial Sequence
  Synthetic
SDSERILKDIEDKLREIKKRSDDNRRRLEKENREVEKRVREILRRIEEENKDVERED

SEQ ID NO: 21890 - protein, 55 aa, Artificial Sequence
  Synthetic
EKVKRDLEEALKTLRKVAEDNKKSLRESLETVKKLLEDLERELRKSAESVRRKMK

SEQ ID NO: 21891 - protein, 57 aa, Artificial Sequence
  Synthetic
SESEELLKRAEDEVRKVEKKSRDNERRLREKLKKAKEDLDRIDEDIKRLNKELEDRN

SEQ ID NO: 21892 - protein, 55 aa, Artificial Sequence
  Synthetic
ERLRRELERILEELRELVRRNEEELKKIMKRVREEVEKLLRKLEKSLESVDRKVT

SEQ ID NO: 21893 - protein, 60 aa, Artificial Sequence
  Synthetic
SRDEKAERMVREVEKKIKELIDRNRRVTEKVKEDIKRLIEDLERVTRDVSRAIKELARRL

SEQ ID NO: 21894 - protein, 55 aa, Artificial Sequence
  Synthetic
EEDDKRIEEDLRKLEEDSRRYDEDLKRELERLRKEVEEYKKRMREELRRLKEEAD

SEQ ID NO: 21895 - protein, 60 aa, Artificial Sequence
  Synthetic
SELERATKVVKRVADRIAELIRENARVTKRVADESRKLLEETETVTREVMRAIEELLKRL

SEQ ID NO: 21896 - protein, 55 aa, Artificial Sequence
  Synthetic
EEDLKKLEDDLKRAADESKKYDDDLRRKLDELRRRHEEYKERLKEMLKRLEDETR

SEQ ID NO: 21897 - protein, 60 aa, Artificial Sequence
  Synthetic
SELEDARRVVKRVADRIKRLIEENERVTKEVKEASEKLLKDTKDATRRLAKEVKELVKRL

SEQ ID NO: 21898 - protein, 55 aa, Artificial Sequence
  Synthetic
EKDKKRLEEELERLRESSERYDERLKRELERLEEEHRRYIRRLKEELDKLREDTD

SEQ ID NO: 21899 - protein, 60 aa, Artificial Sequence
  Synthetic
SEVEELIKDIRRHNTRLEKRMREILEDLKRHLKRSEDKMRKLVKELKELLDRLRDIARDG

SEQ ID NO: 21900 - protein, 59 aa, Artificial Sequence
  Synthetic
EKLLKELEDVIRENEKRSRDIARTLEKALEELRKASKELIDTARDILRKVLEDVDRLRQ

SEQ ID NO: 21901 - protein, 57 aa, Artificial Sequence
  Synthetic
SEVETSAERLKREVEKHHKEVEEYIRRLEEELKKMTRDVERALEKIKEDVDRLRKEQ

SEQ ID NO: 21902 - protein, 59 aa, Artificial Sequence
  Synthetic
EELLKRLRDVLEEVSRRIKDNLEELKKVSERLKRRIEELIRRLEKVMRDVRRSAEEIKR

SEQ ID NO: 21903 - protein, 57 aa, Artificial Sequence
  Synthetic
KEVEEDIERLKRILEKHHKDIERAIRRLEEKLKRLEDKLRKYKRDLEEEVARLKDEQ

SEQ ID NO: 21904 - protein, 59 aa, Artificial Sequence
  Synthetic
EKVLRRLKEVLREIEERIRRNKEELDKALERVKRTIERLIRELEKLSERLKRIADEIAR

SEQ ID NO: 21905 - protein, 57 aa, Artificial Sequence
  Synthetic
DEVDEIVRRLRETVDRHHKRIKEAIEKLKEEVKKHHREIEEYIRRLEEEVKRLADEQ

SEQ ID NO: 21906 - protein, 59 aa, Artificial Sequence
  Synthetic
RKLLEKLDRVLKKLEEDIRRNKEALDRALREAEKSLTDNIKELRDVSREIAERIKEITR

SEQ ID NO: 21907 - protein, 60 aa, Artificial Sequence
  Synthetic
DEKEKVIEDIKELLKELEKKLEDIIREIEKELKRNDEENEESRRRIEDMLRRLEELKRRS

SEQ ID NO: 21908 - protein, 55 aa, Artificial Sequence
  Synthetic
EDVDRVLREAERRVREILKELEEVLRRAEERSEENLRSAEKVLREVEKRLKELTD

SEQ ID NO: 21909 - protein, 60 aa, Artificial Sequence
  Synthetic
SEEERIIKRIKETLEDLKRKLDRIREEIERDIRRNNKKNEDSIRDIERMLRELRRLFEES

SEQ ID NO: 21910 - protein, 55 aa, Artificial Sequence
  Synthetic
KELKEVLEEAKKTVDKILRDLEELLRRAEEESRRNLREAEEVLKKVREDLERLAT

SEQ ID NO: 21911 - protein, 60 aa, Artificial Sequence
  Synthetic
SEEEEVIKEIKDALRDLRRRAEELMKELRELIRENNERNKESEREIRRLLDRLRDLKRRS

SEQ ID NO: 21912 - protein, 55 aa, Artificial Sequence
  Synthetic
EEVKRVLDDAKRAVEEILARIKELLDEVRKASKENLERAEELLRDVERELDRLTK

SEQ ID NO: 21913 - protein, 56 aa, Artificial Sequence
  Synthetic
SEVERLIEDIRRANEELNRKSERKSRESKKENDRLNRESDKKSRDSERVLEELRRR

SEQ ID NO: 21914 - protein, 59 aa, Artificial Sequence
  Synthetic
EELVRRLDELLKESETNVRDNKRRVRDNLRRTEENARRNLEKVKKNVRKIDKVIKEIET

SEQ ID NO: 21915 - protein, 56 aa, Artificial Sequence
  Synthetic
SEVDETARKLDEDLKRLEEEVRRTSKESEDENRKLNETSKRESDESKRRLDELRRK

SEQ ID NO: 21916 - protein, 59 aa, Artificial Sequence
  Synthetic
ERVLRKLKDLVEKVKRVIEKLVKELEDNVKKTKDNARRNKREIEENARRIREEIKKLED

SEQ ID NO: 21917 - protein, 56 aa, Artificial Sequence
  Synthetic
SEVEKEADEVRRTNEELNRRSEETSRRSEEDLRRLEEKVRRASKKSEDDLRRLKRE

SEQ ID NO: 21918 - protein, 59 aa, Artificial Sequence
  Synthetic
EEMVKRLRDVVKRSRENIEENKRRIEDNLRRIDEVIRRLIEELRRNMRRIEEEIERIRR

SEQ ID NO: 21919 - protein, 59 aa, Artificial Sequence
  Synthetic
SEVEREIERLEEDLDRLRREVDEAHKRSKKKLEELRKEVEDYEERVKEELRRLEKLVRE

SEQ ID NO: 21920 - protein, 59 aa, Artificial Sequence
  Synthetic
EEVRERLERALRKAEKDVKRLEDELKRSLKEVRETVRELEERLREVNERVEELLDRLRK

SEQ ID NO: 21921 - protein, 62 aa, Artificial Sequence
  Synthetic
RVEDRVRDLIRKHDETSREIEKRIRDSIKRLADVLDKIRKAIDDLIRKLREAVEDLLRKIGK

SEQ ID NO: 21922 - protein, 59 aa, Artificial Sequence
  Synthetic
EKEVEDLARKIEKLNEDLRRRLEKLDKENKDVIRRLEDALRRLAEEIKRLIDELRERAR

SEQ ID NO: 21923 - protein, 56 aa, Artificial Sequence
  Synthetic
KDEDRLRDDIRRAIEEIEEKLKRLKDRNKEHIERLKKRNEDLNRRNRDVVRRLRER

SEQ ID NO: 21924 - protein, 55 aa, Artificial Sequence
  Synthetic
EELEKLREDLRRVIERVEREIRRSSEENRRVVKKSVDNIRDSLRKNEDVIRKLRK

SEQ ID NO: 21925 - protein, 59 aa, Artificial Sequence
  Synthetic
DVEKKIKDLARELREVIDDARRKNRKLHEDAREVSERHEKAVRDLTEELKRVIDELRKR

SEQ ID NO: 21926 - protein, 59 aa, Artificial Sequence
  Synthetic
EDMLREVEKRVKEEIKRIKDDLDEVRKRHEKKVRDIRKHLKELEDRIKKTEKDLREEAR

SEQ ID NO: 21927 - protein, 59 aa, Artificial Sequence
  Synthetic
RVEEEIERLSRDLKRVIEKAKRDNDRLHKEVRKASEDHKRENKRLHEDVKRVIEELRKR

SEQ ID NO: 21928 - protein, 59 aa, Artificial Sequence
  Synthetic
ERMLKKLEDEIEETKKDIEREIREIDKRHKDAVKELRDHIRELAREHEEEKKRLEETAR

SEQ ID NO: 21929 - protein, 59 aa, Artificial Sequence
  Synthetic
RVEEEIRRLLEESERVHKELEDINRRLHEKVDRVSKKHREENKRLHEKLKRAIDRLREK

SEQ ID NO: 21930 - protein, 59 aa, Artificial Sequence
  Synthetic
EEALKKLEKEVKDNERKLREEARRVEEEHEKTVRDLKKHLDELREEHDRILEELERTRK

SEQ ID NO: 21931 - protein, 60 aa, Artificial Sequence
  Synthetic
SDMEKRKRDIKRKLDESNKKSEEAVREVERKLDESNKEVKKKEERVEDELRKLEEKRRRG

SEQ ID NO: 21932 - protein, 55 aa, Artificial Sequence
  Synthetic
EKLKDIERELRENLKRNEDIVREILKKLEDNLRRVEKLAEDIRRKLEKVADDLRK

SEQ ID NO: 21933 - protein, 56 aa, Artificial Sequence
  Synthetic
SELEEDKKRIEETLRRLEETAKEYHRRSREELRRLEEEAKRYHEESKETLDRLRRE

SEQ ID NO: 21934 - protein, 55 aa, Artificial Sequence
  Synthetic
KKLKDIKEEVERVMKKLEDLVRRDNEESEKVLEKLKRLVERNNEDIKRALEELRK

SEQ ID NO: 21935 - protein, 56 aa, Artificial Sequence
  Synthetic
SEDEERLRRIEEELRRLEEEAREYHERSREELKKLREKAKEYHERSRRELEELRRR

SEQ ID NO: 21936 - protein, 55 aa, Artificial Sequence
  Synthetic
KRLKEITRKVEEVMKKLEKLVRDNNEEIRKVMEELKKLVEDDNEESDRALKELET

SEQ ID NO: 21937 - protein, 56 aa, Artificial Sequence
  Synthetic
DEMETRLEDVRKKLDDSRRETRKVEEDIRRTLEELRREAKKYHEDSKEELDDLRRR

SEQ ID NO: 21938 - protein, 55 aa, Artificial Sequence
  Synthetic
EKLKEIKERIEKVLRENRDVVKKIKEDVRRALKELEELVRKNNEDIKRLLDELRR

SEQ ID NO: 21939 - protein, 56 aa, Artificial Sequence
  Synthetic
SRVEEVERRVRDKSRKSKEKLRKLEEDVRRESETSRDRLRKLAEEVKTKVKELKDK

SEQ ID NO: 21940 - protein, 56 aa, Artificial Sequence
  Synthetic
SEDLKRLAKEIEDNLEELERKIREIRKELRRSLEEVEKTVEDLKRELKKVLDELRK

SEQ ID NO: 21941 - protein, 60 aa, Artificial Sequence
  Synthetic
SDIEEAKERLERKLEKLLRKVEEYLKEIADEIRRLEEELEEYNRRSKERIDRVLEVKERG

SEQ ID NO: 21942 - protein, 56 aa, Artificial Sequence
  Synthetic
ESVLKELEELLKELEDRIRKILTESTELLRRLEKRVRDSLRRNTEELDELLDRLEK

SEQ ID NO: 21943 - protein, 59 aa, Artificial Sequence
  Synthetic
SEVEKSEKKLRDEIERLVRENEKYLERIKELVEELLRELEKAVRELEKEVTEIEEVKRQ

SEQ ID NO: 21944 - protein, 56 aa, Artificial Sequence
  Synthetic
ERVLKKLRDLVKEVVDRSKRSLDESTKVLDTLEKEVRKVLEALKDILREALERLDK

SEQ ID NO: 21945 - protein, 60 aa, Artificial Sequence
  Synthetic
SREEIIKKLKEEVERLLRESAKVLEELKRRLEALLRESEEILRELRELVRTLLEKLERDG

SEQ ID NO: 21946 - protein, 59 aa, Artificial Sequence
  Synthetic
EKDLKKTEDDLKREADEHRKAVEDELRKVKKRLEEHRERVRKRLEDIEKTLRDIDREVR

SEQ ID NO: 21947 - protein, 60 aa, Artificial Sequence
  Synthetic
SSVEDLLRKAEEVVRRAEEKSRDSHEKTKDVLRKVKRKSEELNKHNRESIKKVEEVRRRT

SEQ ID NO: 21948 - protein, 55 aa, Artificial Sequence
  Synthetic
EEVLKTIEDLLRKLERKVRETIETDRRLLRKVEEELKRSIEDSRRLVDELKKRVT

SEQ ID NO: 21949 - protein, 60 aa, Artificial Sequence
  Synthetic
SSKDRLRDEIRRVVERVREISERVNKHNRDSVKRVEEESRRINKEIRKVVEDVDRMRRRV

SEQ ID NO: 21950 - protein, 55 aa, Artificial Sequence
  Synthetic
EEVLREIEKLVRDVEREVRESIERSKRLVKELEERVKKSIDEIKKEVDDVERKLK

SEQ ID NO: 21951 - protein, 60 aa, Artificial Sequence
  Synthetic
KEVEDLKEKVKRVVEEVEKISRELNKHNRDSVRRAEKTSKELNDHNKDSIRKVREVLKRT

SEQ ID NO: 21952 - protein, 55 aa, Artificial Sequence
  Synthetic
DKVLKDIKKLLKDVEKKVRESIKESKELVKRLKDKLEESIRRSKKDVEDLKREVD

SEQ ID NO: 21953 - protein, 60 aa, Artificial Sequence
  Synthetic
SSVDKLRKEIREVLRRVERISEESHKHNEESVRKVKERSERLNKHNRDSARDVERVLREV

SEQ ID NO: 21954 - protein, 55 aa, Artificial Sequence
  Synthetic
EEVLEEIRRRLEEVEERVRRDLEESKKLVDELRKRVEKSIRESRKLVDDLRKRVT

SEQ ID NO: 21955 - protein, 60 aa, Artificial Sequence
  Synthetic
SSVDKLKDEVRKVVETVKDLSRRLNETAKRVADRVRKISRETHEEVRKVVEDVKDVRRRT

SEQ ID NO: 21956 - protein, 55 aa, Artificial Sequence
  Synthetic
ETVLEELKRLLDKVREDVRRSIEEIRELLKTVEKEVRDDSRDLERLLKRVEEETK

SEQ ID NO: 21957 - protein, 60 aa, Artificial Sequence
  Synthetic
SSVDRVREEIERVARRVRKLSEDSHREVEKVLKEVEEISKRTHEEIDKVVKEVEKVIRDT

SEQ ID NO: 21958 - protein, 55 aa, Artificial Sequence
  Synthetic
EEVLEEIRRLLETVEREVKTDIDRLREELRRVEEAVKKDSEDIRRKLKRVEDDVK

SEQ ID NO: 21959 - protein, 58 aa, Artificial Sequence
  Synthetic
REAEDIVRRSHELVERAREKLRRLNKDSERLVDEVEKELREVVERVAELIKRAKDEIG

SEQ ID NO: 21960 - protein, 59 aa, Artificial Sequence
  Synthetic
EEVLEKVLRDSERVLKELEEKLRKSLEDVKRVIDEVKKVLEDVKRKVEEVLKRVRDKRR

SEQ ID NO: 21961 - protein, 58 aa, Artificial Sequence
  Synthetic
SRAEKVERESHELVRTLKEELDRVVEKVERLVRRVEEELKRVNKESAELVKELKDRIG

SEQ ID NO: 21962 - protein, 59 aa, Artificial Sequence
  Synthetic
DEVLTKLVKSSRDVIEEIREDLKRVLKEAEEVIRRVKKRLEDSLEKVKEVLRELLRAAK

SEQ ID NO: 21963 - protein, 58 aa, Artificial Sequence
  Synthetic
SSAEDVVRRSHELVRRLEEELDKVNEDSERLVREVEERLKRANEESKRRVEDAKRRIG

SEQ ID NO: 21964 - protein, 59 aa, Artificial Sequence
  Synthetic
EEVLEEVLRRSREVLKKLKEDLKRSLDDAERVIRRVREDLKRSLKRVREVLEEVRRRTK

SEQ ID NO: 21965 - protein, 58 aa, Artificial Sequence
  Synthetic
SSVDRIVEESHTRVRKLMKDLEDVNDESRRRVERLRERLEEVVKEVEKLVEELRRRIG

SEQ ID NO: 21966 - protein, 59 aa, Artificial Sequence
  Synthetic
EEVLKTILERSREVLDRIRKELERSLKEVEDVLRRIEKDLKKVLDEAREIIKRLLDEAK

SEQ ID NO: 21967 - protein, 60 aa, Artificial Sequence
  Synthetic
SRLETVLERAKELIDRIRKLLEDVRRKVKELIDRIRRLNEEANRESEELIRRIEEELRKG

SEQ ID NO: 21968 - protein, 57 aa, Artificial Sequence
  Synthetic
DARRILEEVRKLVKELEEELRRALKEVRDLAKEVDEDSKRALDRNEKLIRDLDRKVE

SEQ ID NO: 21969 - protein, 60 aa, Artificial Sequence
  Synthetic
RELEEAKKKVEDLLRRILEENERAHEESKKLIEEIRRLLKKMNEESEELRERIRKKLEEN

SEQ ID NO: 21970 - protein, 57 aa, Artificial Sequence
  Synthetic
DVERALDDVRRLLREVERRSEELLRTDEEAIRTLKKEIDKVLKENKDKADRLKEEVN

SEQ ID NO: 21971 - protein, 60 aa, Artificial Sequence
  Synthetic
DELETVERRVEKLIEDIKRELRKVHEESKKLIREIKKELEDANRESERVIEEIKRELDRD

SEQ ID NO: 21972 - protein, 57 aa, Artificial Sequence
  Synthetic
DARKMLEDVKKRAKDVEDEIEEVLRRDRELIKELKRELDEALRENRRLIEDLKRKIK

SEQ ID NO: 21973 - protein, 60 aa, Artificial Sequence
  Synthetic
SEAEEALKRVKKAIDDARKLLEEANRKDKKSIEEAEKLLREAHERSKKAIKEAEDALDKA

SEQ ID NO: 21974 - protein, 57 aa, Artificial Sequence
  Synthetic
DAEKALRDAKRLADDLKRTADEVLKENKRTAEDLKRKADEVLERDKKLAKELKEKAT

SEQ ID NO: 21975 - protein, 60 aa, Artificial Sequence
  Synthetic
SELEDVKRKVKRLIEDIERALTEANKEDEKSIEETERLNRTVHEESKELVERLKDELRKR

SEQ ID NO: 21976 - protein, 57 aa, Artificial Sequence
  Synthetic
DVDEALKEVRDRAKKLKDKIKKVLDDNRRTVEDNERKSDELLKTDKELVREVKERTE

SEQ ID NO: 21977 - protein, 61 aa, Artificial Sequence
  Synthetic
RELEKVRKEVERLIKEIKDLNKRAHDETKTRIDRIREKNEKVHEESKRLIREIEELLRRKG

SEQ ID NO: 21978 - protein, 55 aa, Artificial Sequence
  Synthetic
EEVIKEVEKRLDELRKESKKLLDDDRRLIEKLKEESRRLLEEDRRLIKELKEKVK

SEQ ID NO: 21979 - protein, 61 aa, Artificial Sequence
  Synthetic
SAAERAAEEVKKLIDEARKLLERAHRETKKLIDEARKLNKRALDEVRRLIEEADRLLRRDG

SEQ ID NO: 21980 - protein, 55 aa, Artificial Sequence
  Synthetic
EEVAERARRLAEELKKEADDVLRKDRDLARRAREESEEALKEAEKLARDLRRRAK

SEQ ID NO: 21981 - protein, 60 aa, Artificial Sequence
  Synthetic
KEAEDIKRKVEKVAREITEKSRKSHEELRKVVKEARDKSEKSLRDVERVLREIEELLRRR

SEQ ID NO: 21982 - protein, 55 aa, Artificial Sequence
  Synthetic
KDLIEEIKRRLDEVRRRSEDNLKKMEEELKKVEEDSRRVVERIRTELKRVEDEAR

SEQ ID NO: 21983 - protein, 60 aa, Artificial Sequence
  Synthetic
SEAEKIRKDVEKVIREVREDSKRTLERSRKVDEEIRRKSETSHRLVEEVIRRAEELLRRE

SEQ ID NO: 21984 - protein, 55 aa, Artificial Sequence
  Synthetic
EELIEEIKKALEDVKRESEKVKEESRKSLEDVERDSDRNLKDMERLLREVTERAK

SEQ ID NO: 21985 - protein, 60 aa, Artificial Sequence
  Synthetic
DEVEEIRKEVERVIREVEEKSKETLRRSEKVDREAKKKSDDSRRKVEKVADEIRRLLETR

SEQ ID NO: 21986 - protein, 55 aa, Artificial Sequence
  Synthetic
KDVIEEIRRLLDEVRRRSEKVIRDSERSAEEVKERSERVIEELKRLLEKVAREVK

SEQ ID NO: 21987 - protein, 60 aa, Artificial Sequence
  Synthetic
SSVERVERDVARVAREIRKISRDTKEESKEVDRRIDEISKRTNEDVRRVAEEIKRLKEKR

SEQ ID NO: 21988 - protein, 55 aa, Artificial Sequence
  Synthetic
KDVIKEIEDRLREVEEESKKAIEESKTSLKRVKEKSEKNVEDMKKLLEKVREDVR

SEQ ID NO: 21989 - protein, 60 aa, Artificial Sequence
  Synthetic
SEVEKVLDEIRRLLKEVEERSKENNDRNEELARRNTRRSEENIRRIEELLRRVREEARKD

SEQ ID NO: 21990 - protein, 59 aa, Artificial Sequence
  Synthetic
EKFLREVRREIEEIIRRIKEASEKTHKEAKEVVDRINELSRKSHETIKEIIKRVRDRAK

SEQ ID NO: 21991 - protein, 60 aa, Artificial Sequence
  Synthetic
REVDEVLDEIRRLLERVREESEKNNRDNEKLMRDNEDRSRKVIETIKRLLEDVKDRATKK

SEQ ID NO: 21992 - protein, 59 aa, Artificial Sequence
  Synthetic
EKFLREVRREIEEIIRRIRELSERTHREAKEIVDRINELSKRTLDKAKEMLDRAEEKAK

SEQ ID NO: 21993 - protein, 60 aa, Artificial Sequence
  Synthetic
DEVEKVLRDIEKKLEDVERRSKEVIDEIRKLLKEVEEESRRNVKKIREELKKVVDDVRRK

SEQ ID NO: 21994 - protein, 59 aa, Artificial Sequence
  Synthetic
EKFLRDVKRMVDEILDTARELSRRTLEEIKRIIARIRERSEKSHEEARKALRDVEEKAR

SEQ ID NO: 21995 - protein, 60 aa, Artificial Sequence
  Synthetic
DSVREVLKKIEDELERVKRDNKDVNRKNEELMRRNEERSRRVVEDIKRKLKELVDDVRRN

SEQ ID NO: 21996 - protein, 59 aa, Artificial Sequence
  Synthetic
EEVLKRVDEEAEKVLRENEKLSKKSLDEAREIVREINRLSEDTRREADEILERVKEKVR

SEQ ID NO: 21997 - protein, 60 aa, Artificial Sequence
  Synthetic
DEVETVLEKIERLLRKLEKDSREVIKKIKRLLDEAKKESRKNIEEIKKLLEEVKREVDRR

SEQ ID NO: 21998 - protein, 59 aa, Artificial Sequence
  Synthetic
ERFLREVEKELEDMLRRVRKLSEDTERKIREILERIKRLSDDSNRKAKEILREIRKRAE

SEQ ID NO: 21999 - protein, 55 aa, Artificial Sequence
  Synthetic
DELEKVKEEIRRLLRRIEEDVKRSEERNKELLRRITEEVKRSERRNEELLKEIKD

SEQ ID NO: 22000 - protein, 56 aa, Artificial Sequence
  Synthetic
LKKVREDLERMLRRVEEELKRSNEESERAIEEVRRELEDIDRESRKAIEDVLREEK

SEQ ID NO: 22001 - protein, 59 aa, Artificial Sequence
  Synthetic
SEIDEVLTRLRKISKDLNETSDRVNERARKIIDDIKKESKRVNDEAREIVERLKREIDK

SEQ ID NO: 22002 - protein, 59 aa, Artificial Sequence
  Synthetic
KDKVERVVREVEKLHEEDRKRLEESTRSVRKLLEELKRELEKSTRSVKKLVDELRERVR

SEQ ID NO: 22003 - protein, 59 aa, Artificial Sequence
  Synthetic
DEVDEMLKRAEDRIREISDTSRKVNEDARKIVEDLKRDSERVLRELRKRIEELRREIER

SEQ ID NO: 22004 - protein, 59 aa, Artificial Sequence
  Synthetic
EKRVREVAEEVKRLVKELEERLRRSTESVKRLLEDVERAVKESSDEVEKLLRRLREELE

SEQ ID NO: 22005 - protein, 59 aa, Artificial Sequence
  Synthetic
DEIEEVLRDAKRISDELNRRSEEVNRELREIIKELTKRSRKVLEELKKIVRDLEKKIKD

SEQ ID NO: 22006 - protein, 59 aa, Artificial Sequence
  Synthetic
REKAERVLRTVEELHKEDRDRMKESTDSVKRLLEELKRRAEKSSRTVEELLRRLEEKIR

SEQ ID NO: 22007 - protein, 59 aa, Artificial Sequence
  Synthetic
SEIDELLERAKKRSKELNDTSKEVLDRARRIIEEISKTSEEVNKDLERIIRELAEEIKR

SEQ ID NO: 22008 - protein, 59 aa, Artificial Sequence
  Synthetic
EKRVREVLKEVRRLHEEDRKRMKESSEDVERLLTELRKRMKESTDSVEKLLKELEDRVR

SEQ ID NO: 22009 - protein, 59 aa, Artificial Sequence
  Synthetic
SSLEKLLEDVRRRSEELNRRSRKVLEDLKDIIRRLKEESKRVLDEAKKKVDDVERKIDK

SEQ ID NO: 22010 - protein, 57 aa, Artificial Sequence
  Synthetic
KVRKALEDVRRLHEEDKRRVDESSKEVERLLRELREDMKRSSEEVERLVKRVRDRLK

SEQ ID NO: 22011 - protein, 59 aa, Artificial Sequence
  Synthetic
SEADELLKEVKRISDELNDTSRRVLEELREISRRLNEDSKRVLKELEDILEEIRERIDR

SEQ ID NO: 22012 - protein, 59 aa, Artificial Sequence
  Synthetic
EERVRELVERVKELHEEDKRRMDDSSRDVERLHKEDADSARDSSRKVRELLEELRRRVE

SEQ ID NO: 22013 - protein, 60 aa, Artificial Sequence
  Synthetic
KELEDVLRELKRILEELEKLSREADERSKEIVKRLVEETTRSLKEVKEIVERLKELDDAG

SEQ ID NO: 22014 - protein, 59 aa, Artificial Sequence
  Synthetic
EKRAREVRETVRKLVEDVKKKNEESERRNRELVKEVRKRNKEVRDRSRKLVKELEDKLR

SEQ ID NO: 22015 - protein, 60 aa, Artificial Sequence
  Synthetic
SSLEKVLKDLRKILEDLRREIKTVLDDLRRILEELKRETERVDKKSKEIIETLSELRKAG

SEQ ID NO: 22016 - protein, 59 aa, Artificial Sequence
  Synthetic
KKKVDEAIREVEKLIEELRRDLDRVRKTVEKLVRDLERRNEESKRRNEKLVRKLEEELR

SEQ ID NO: 22017 - protein, 59 aa, Artificial Sequence
  Synthetic
DELETVLRKLEKLVRDLKKRSTDVLRRLEEIVKELTDETKRVDDESRDILRRLKELRDR

SEQ ID NO: 22018 - protein, 59 aa, Artificial Sequence
  Synthetic
KEEADRVITTVEELVKELRRRNEEVKERVEKLARELRRRNEESIKTNEKEVRELEKRLK

SEQ ID NO: 22019 - protein, 60 aa, Artificial Sequence
  Synthetic
STLKKVLDENRKSIKELLDMSRRVLEKLREILRRLEEETREVDEKSERIVTTLEELIKAG

SEQ ID NO: 22020 - protein, 59 aa, Artificial Sequence
  Synthetic
EDKAKKVIDEVRKSVKRLEEENERVLRDVERLVREVEKKNRESEKRNRKLVEELRRKLK

SEQ ID NO: 22021 - protein, 60 aa, Artificial Sequence
  Synthetic
SVLEEVLKKLEKILRELKREIEEVLKKLRRILEELVRETEKSLEKVDRIIKELEKLIEAG

SEQ ID NO: 22022 - protein, 59 aa, Artificial Sequence
  Synthetic
EKKAREVTKTVEKLIRELRKTLEDVKREVRKLVEEVKRRNKDVERKSRELVKKLEERLR

SEQ ID NO: 22023 - protein, 60 aa, Artificial Sequence
  Synthetic
STLEEVLERNKESIERLRKESEDSHRKLKEIMERLKRETERSLEEVEEIVKRLKELTDEG

SEQ ID NO: 22024 - protein, 57 aa, Artificial Sequence
  Synthetic
KVKRVIEKAKKSVEDLERRLREDEEAAREWVKKLRTENEKVRKRSEELVRELEERLR

SEQ ID NO: 22025 - protein, 59 aa, Artificial Sequence
  Synthetic
STLEKVLRDLRKILEELLRMSKKVLEELKRLADRLKEEIKKSLDKVKKIIDELRDLTRK

SEQ ID NO: 22026 - protein, 59 aa, Artificial Sequence
  Synthetic
EDKARKVIEEVTREVRRVEEENKKVERTVEKLVEELEETVREARERSERLVRTLEEELR

SEQ ID NO: 22027 - protein, 60 aa, Artificial Sequence
  Synthetic
SDAERVEKEIREVLKRVEDLLRRVNEETKKVAKEVRELLKEVDDRSREIMKRVAEKLRRI

SEQ ID NO: 22028 - protein, 55 aa, Artificial Sequence
  Synthetic
KDVAREVEKLLRELEKKLEEVNRHDKKLLEELEERLKESEERNRRLLEELKRRLD

SEQ ID NO: 22029 - protein, 60 aa, Artificial Sequence
  Synthetic
REVEEVLKRIEELIRRSEEETREVNERTKKLAEDVRRLLEEVDRRSKKIADEVRELLERI

SEQ ID NO: 22030 - protein, 55 aa, Artificial Sequence
  Synthetic
KDLVRTVEELLKRNEEDLRRVNEHDKKLLEDLTRSLERSEERNKTILEKLKEDLR

SEQ ID NO: 22031 - protein, 60 aa, Artificial Sequence
  Synthetic
SDAEKVLDEIRKRIEESEKRTKEVNDRTREVLDRVRKLLEKVNKESRKVAEDVREAAERI

SEQ ID NO: 22032 - protein, 55 aa, Artificial Sequence
  Synthetic
EEVRKDVERLLRENERSLREVNRHDEALLRELEKRLEEVNRHDDKLVKDLRERER

SEQ ID NO: 22033 - protein, 60 aa, Artificial Sequence
  Synthetic
DEVREILEDVKRINKEVEDELRKIEEEIREIVKTVRDESRKTLEELERILRKVEDDLRKD

SEQ ID NO: 22034 - protein, 55 aa, Artificial Sequence
  Synthetic
EEAVKDNERLAKETEDKVREVVKRIRKIIEEVERTARESERRLRKLLKEVEDRAR

SEQ ID NO: 22035 - protein, 60 aa, Artificial Sequence
  Synthetic
EEIERILEELRRIAKKVEEDSRRTLETVRRLNEEVKRRLREILEEIRRVAEDVRRKLDEK

SEQ ID NO: 22036 - protein, 55 aa, Artificial Sequence
  Synthetic
EDVKRELERILEEVRKKSREALEKNKRLLEDTRRVVEEVKRELEKILRDVKRKVD

SEQ ID NO: 22037 - protein, 59 aa, Artificial Sequence
  Synthetic
SVVEELRDELRRAEEENRKIVEDTTRRLEDMIRRDEKINEEVERRLEEVTRRVEELRKQ

SEQ ID NO: 22038 - protein, 59 aa, Artificial Sequence
  Synthetic
ERKAREMEKEVTEILRRLEEENKRDLDRIKKLLDELRKKNEDTLRRIRRLLEEVRERLR

SEQ ID NO: 22039 - protein, 57 aa, Artificial Sequence
  Synthetic
SSLDEVLERLRKLLKEIEDKVRRINEEVKKSSEDVERELKRVVDELKRRVERLKEEV

SEQ ID NO: 22040 - protein, 59 aa, Artificial Sequence
  Synthetic
ERELEKILRDAERVVREIEKRHRDLLEELKKANEDTRRALDEIRKEAERVLERVREEAK

SEQ ID NO: 22041 - protein, 57 aa, Artificial Sequence
  Synthetic
DEVEEVLKRLRESSEESKRRADDVTRRAEESSRRVHKRSREVVERLKKLVEEVERRV

SEQ ID NO: 22042 - protein, 59 aa, Artificial Sequence
  Synthetic
RRELEKLEREMRDVDRRTDEALERLLRTLEEVNKRTDEENKKILEDLKRVVEEVEERDR

SEQ ID NO: 22043 - protein, 57 aa, Artificial Sequence
  Synthetic
SEIEKVIEELRRSSEESHKRSRKVEEDARRSSDEVHRRSREMLRKLREEVKDVERKV

SEQ ID NO: 22044 - protein, 59 aa, Artificial Sequence
  Synthetic
RRDLRRLREEMRRVDERTTRENEKILRELEEVNKETIKENERLLRDLKRVVDRVREEDR

SEQ ID NO: 22045 - protein, 57 aa, Artificial Sequence
  Synthetic
RRIEEVIKEARKSSRESHEESKEVMERLKRSSDDSHRKSEEVLRRLRKLVEDVERRV

SEQ ID NO: 22046 - protein, 59 aa, Artificial Sequence
  Synthetic
DRELKKLRDELKRVDDETRKANEEILREMEEVDKRSKEANDRLLEELAKVVKRVDDEDR

SEQ ID NO: 22047 - protein, 57 aa, Artificial Sequence
  Synthetic
KDIEEVIRRLRESSKESTKRLRDVVEDLKRSSKEVHDESEDVLRRLEELVRRLKKKV

SEQ ID NO: 22048 - protein, 59 aa, Artificial Sequence
  Synthetic
KRLLKELEDRMRRVDERTDEELEKIRKRMKEVDDRSRDVNRKLAEDLKRAIKRVDDEEK

SEQ ID NO: 22049 - protein, 61 aa, Artificial Sequence
  Synthetic
DEVREVLRRDEELHRELKERIDRILEELERLHRDLKRKIDRVLEELKRLHEDVKRELDKRG

SEQ ID NO: 22050 - protein, 59 aa, Artificial Sequence
  Synthetic
EEALRKLHEESKKSVRDVEKELEELRRENKKVIEDLEDELRRLLEENKRAADELRKRAE

SEQ ID NO: 22051 - protein, 61 aa, Artificial Sequence
  Synthetic
DEVEKVKDDVRKLVEKVKRDAKRAHEDNERKHRKLKKELDDALRELKKRHEELKRRIDDRG

SEQ ID NO: 22052 - protein, 59 aa, Artificial Sequence
  Synthetic
DEALRRLKEELDKMIEDVRKELRKLNEDSDDSIRRVKKRLKELRDENEKVIRDIRRETE

SEQ ID NO: 22053 - protein, 60 aa, Artificial Sequence
  Synthetic
SELEKVRKKVEDISRESEKHLREVKKENDRIIKEIEDELRKLLTDVEREIREVEKRIREE

SEQ ID NO: 22054 - protein, 58 aa, Artificial Sequence
  Synthetic
EKAKRVFEEIERIVRRNKEELRRILKELRELHEEVKEKIKKVLEDVKRLVDELLERAK

SEQ ID NO: 22055 - protein, 60 aa, Artificial Sequence
  Synthetic
SELEKVLRDVREAIKRNEDLLRRVHEESRRISEESEKNLRRVHERSRRIAEDVRRVLRER

SEQ ID NO: 22056 - protein, 58 aa, Artificial Sequence
  Synthetic
EEAEKVAREAKKLVDDLKRKNDEVLDEDRKEVERNERELERVLREDKKLLEDLEREIK

SEQ ID NO: 22057 - protein, 60 aa, Artificial Sequence
  Synthetic
DFAKKLEDEARRVSEESRRHLEDLLRRSKESIDALKRKLEDMLRRVREVIKRIEDELRRE

SEQ ID NO: 22058 - protein, 55 aa, Artificial Sequence
  Synthetic
ERVIERIKELLDRNRKELEDVARDAERLNRELNERVDRVLKEVEERLKELEDRVK

SEQ ID NO: 22059 - protein, 60 aa, Artificial Sequence
  Synthetic
DKAKELEEEIRKIIREIEELLRRMEETSRKSSKESEKHLRDAHEDSRRIAERIKDLLRKE

SEQ ID NO: 22060 - protein, 55 aa, Artificial Sequence
  Synthetic
EDVIRELERLLRELKKRIEDVVRRIKELNEDNNRKVEKIREDDERLLEKVRRDVK

SEQ ID NO: 22061 - protein, 60 aa, Artificial Sequence
  Synthetic
SAAEDVLRKVEKIIKEIEELLKRALEESRKSVKELEKILRDAHEKSRKIAREIEDALRKR

SEQ ID NO: 22062 - protein, 55 aa, Artificial Sequence
  Synthetic
DEVVEEIKRLLEELRKKIEDVADEIRRLNEEVNKKLDDLVKTDTKLLEDVDRKVK

SEQ ID NO: 22063 - protein, 60 aa, Artificial Sequence
  Synthetic
SAAEEVRKKNEKISRELEKLNRKALEDSRDSIRKLKKILDDAHKDSREIIKEIEDLLRKR

SEQ ID NO: 22064 - protein, 55 aa, Artificial Sequence
  Synthetic
DEVVEEIKRSNDENNERSKKVLDEIKKLNKEVNDRVEELLERDKRELERVKRDVD

SEQ ID NO: 22065 - protein, 60 aa, Artificial Sequence
  Synthetic
DEFRDIEERAKELAEENETINRRVLTEHKKLIDELREILERVLREHEKRLKDLKDLVRKI

SEQ ID NO: 22066 - protein, 55 aa, Artificial Sequence
  Synthetic
EEILERIRKLLEDVEEKVKKSVEDSRRLLKTIREEVERVLDTSRKLLKRLEDDVR

SEQ ID NO: 22067 - protein, 61 aa, Artificial Sequence
  Synthetic
SDLEEVEKRAEEIIRRNKEELEKVLRESKDIIDKNRKLNKESLDEVKRIIERLEDLLRKDG

SEQ ID NO: 22068 - protein, 58 aa, Artificial Sequence
  Synthetic
EEVRKVAKKIRDEAKKSHDESKKLNDTSRDLVRKSKEEAERIDEEMKKLLKEIKDKVR

SEQ ID NO: 22069 - protein, 60 aa, Artificial Sequence
  Synthetic
SEVEEILKRIEDLARTLLKLNEDSLRRNEEIIRTIKELNEKTLKENKEIIDRLRELLRRT

SEQ ID NO: 22070 - protein, 55 aa, Artificial Sequence
  Synthetic
ERVLKEIEDLLREVADRSRKFNERSERLLREVEERSREVNDRSKKLMDTIAKEVK

SEQ ID NO: 22071 - protein, 58 aa, Artificial Sequence
  Synthetic
SEVEKALERVKKLAEDLERLDKESLERVEKVIRDAERLDKTSREEVKKIADEADDLRR

SEQ ID NO: 22072 - protein, 55 aa, Artificial Sequence
  Synthetic
EEVLRRIRRLLEEVRKKVEDSNRELKRRLDELEKRVRDSNKEIRELVKEVERKVN

SEQ ID NO: 22073 - protein, 60 aa, Artificial Sequence
  Synthetic
SRLEEVLRRIRKLLRDNKETAKRVLEEIERLLREADKRNREALKEIEKRMREVEDKLRKA

SEQ ID NO: 22074 - protein, 59 aa, Artificial Sequence
  Synthetic
EKDLEELRRRVKEVSDESRKLLEDLLDEARKVLEENRKLVEEILREAKKVIDEIEEKLR

SEQ ID NO: 22075 - protein, 60 aa, Artificial Sequence
  Synthetic
SELEKVLREIRRLLDEARKRNEEFLRRIEELLRRNEEEVRRVLEKIERKVERVKRDLERR

SEQ ID NO: 22076 - protein, 59 aa, Artificial Sequence
  Synthetic
EEKLERILRTARKVVEDNERLVREVLKKVKRVSDESRRLLEEIDREVDEVIKRLEERAK

SEQ ID NO: 22077 - protein, 59 aa, Artificial Sequence
  Synthetic
SEAEEIRRRLEEISRRSVEHLRKVLEEIKRISERSKRHLDRVLEENKRRLEELRELLER

SEQ ID NO: 22078 - protein, 56 aa, Artificial Sequence
  Synthetic
EEVLRELEELLKESEERIKRIEEEIKKIIDKSREDIKRVLEEIERLNKKAADDLRK

SEQ ID NO: 22079 - protein, 59 aa, Artificial Sequence
  Synthetic
DEVREVLEELKRISDDSIRHLEEVLRRLREIIERLKATNDDVLRELEEIIRTLLDLDRQ

SEQ ID NO: 22080 - protein, 56 aa, Artificial Sequence
  Synthetic
KEALDTLERTVEESKKRIKEILDRVKELIDKAREDSKRSVEEVRRRIEKARRDLDR

SEQ ID NO: 22081 - protein, 59 aa, Artificial Sequence
  Synthetic
SKVDELLKRLEDIIRKLDKENEKVLRELEEISKRSVDHLKRVLEENRRILEELERLLEG

SEQ ID NO: 22082 - protein, 56 aa, Artificial Sequence
  Synthetic
ERVLRDLKRLVDEARRRSERSLEEVKRIADESRKEIERILREIEEENRRAKDKLRR

SEQ ID NO: 22083 - protein, 59 aa, Artificial Sequence
  Synthetic
SRAEDLLRRLEKIIRDSLRHLREVLKRLERIIDELRKTNERVKEELERIIDTLRKLKDN

SEQ ID NO: 22084 - protein, 56 aa, Artificial Sequence
  Synthetic
EEILRRARELVDESRRRLEKVVKEVRDVIRTLKKDSDKSLRDLEEEVRKAEEDLRK

SEQ ID NO: 22085 - protein, 59 aa, Artificial Sequence
  Synthetic
DEVRELLDTLRRIIERSVKHLEDVLRDLKRIIDKLREDNRRVLEENRRRLEELDKLRKE

SEQ ID NO: 22086 - protein, 56 aa, Artificial Sequence
  Synthetic
EEFLRDVERLAEESRRRLEAVEREVERLITEAEKESKKSLDEVERLNRELKERLKK

SEQ ID NO: 22087 - protein, 60 aa, Artificial Sequence
  Synthetic
DVEDILRTIRDLIRRVDEKSRKTLEENRRAIEEVLRRSDETLRRNKKLIEDVEEEVRRTV

SEQ ID NO: 22088 - protein, 59 aa, Artificial Sequence
  Synthetic
REFMETVLRKIKEDIERLEERNREVHEKSREEIRKLEEENEEVHRKSRKEIDEIRKELK

SEQ ID NO: 22089 - protein, 60 aa, Artificial Sequence
  Synthetic
DVEEILKEIRKRIEDVKRESEKTLKEIRDLIKKVAEDIERSVKENRELIDKVRRELERDV

SEQ ID NO: 22090 - protein, 59 aa, Artificial Sequence
  Synthetic
RKVLTDVLKEIERRIDELRRRNEEVVEKIKREIKKLEDESKRVNDESREIIKRIKEEVD

SEQ ID NO: 22091 - protein, 60 aa, Artificial Sequence
  Synthetic
DVEEIIREIRKLIEKVLRDVRRSAEENKKLIDEVKRRVEEMLKRNRDMIKKVLDDVRREV

SEQ ID NO: 22092 - protein, 59 aa, Artificial Sequence
  Synthetic
REFLKKVLDEIREIIERLRRESEKVNEDSKREIKDIERELREVHKKSRRIIRRIEEKLR

SEQ ID NO: 22093 - protein, 60 aa, Artificial Sequence
  Synthetic
DEAREVLERLKKISEEDKRRSDKVNEETRRIIKEAEERSRKVNEETKRIIEKLEEDLRDR

SEQ ID NO: 22094 - protein, 56 aa, Artificial Sequence
  Synthetic
EEILRELREILRENTERVERSLRDNRRLLDELRKKVERSAEENERLLREAEEKLRK

SEQ ID NO: 22095 - protein, 60 aa, Artificial Sequence
  Synthetic
SEVDKVLDDSRKSAEDLRREIETVLKRNKELIDENRKRLKEVLDRNAKLADDLRRERKKG

SEQ ID NO: 22096 - protein, 56 aa, Artificial Sequence
  Synthetic
ERVVRTLEKLIEEWRKAVEDVLRTLEKLTEEAKRESERILEELKRITKELRDEERR

SEQ ID NO: 22097 - protein, 59 aa, Artificial Sequence
  Synthetic
SEVEDVLRRLEELLRRLEKKSRESLEELRRRLDEVRKDSERSNEDSERLIRELEEIRRK

SEQ ID NO: 22098 - protein, 56 aa, Artificial Sequence
  Synthetic
KEFLDTMRRIVEELKKRLKEVNDRIKDIVRRAEEELKRSNDENKERIERAEKKVRD

SEQ ID NO: 22099 - protein, 59 aa, Artificial Sequence
  Synthetic
SELEKVLEELKKLLEELERESDTSVKELRTLLERLEEESKESNERSKRLAEELERRLKD

SEQ ID NO: 22100 - protein, 56 aa, Artificial Sequence
  Synthetic
REFLETMERIIEELEKRLREVNEDLKRIVRTVAERLKKSNRDNRELIRTLKDRVRT

SEQ ID NO: 22101 - protein, 59 aa, Artificial Sequence
  Synthetic
SEVEDVLRRLEELLRRLKEKSKKSNEESKKLIKELKEESDKSRRDLERLLEKLDRDLKR

SEQ ID NO: 22102 - protein, 56 aa, Artificial Sequence
  Synthetic
REVLERMRELVEKLKEDLERSNKENKDLIDKVKRDLEEVNRRLEKIVREVKERVRT

SEQ ID NO: 22103 - protein, 59 aa, Artificial Sequence
  Synthetic
SEVEDVLRRLRELIEELRERSERSNEESKRLADELEKRSEESLRRLAELLRKLEEDLRR

SEQ ID NO: 22104 - protein, 56 aa, Artificial Sequence
  Synthetic
REVLTTIAKIVTDLERELRKSNEENKKLIDELRKRLEDSNKRVKEIVKRLEEEVRR

SEQ ID NO: 22105 - protein, 60 aa, Artificial Sequence
  Synthetic
KDVEEALKELERVLEELKRLSKELLDRLRELADRIRRISKELLEELKRLLKDIKETVDRI

SEQ ID NO: 22106 - protein, 56 aa, Artificial Sequence
  Synthetic
EDVLRRLRELIEKVKRDLDRTDETLKELIKTLEDELRKSNETIEDLIRRLEEALRK

SEQ ID NO: 22107 - protein, 60 aa, Artificial Sequence
  Synthetic
SDLERLLDELRKLLDDLRRKSEELLRRLDTLAKKIEREAEKITKDNKELIDRLRDRLRRI

SEQ ID NO: 22108 - protein, 56 aa, Artificial Sequence
  Synthetic
ERMLRTLERLIEKLKEELKRTDKELERLIRELKKRLDDNNRRNEELIKRVEDELRK

SEQ ID NO: 22109 - protein, 60 aa, Artificial Sequence
  Synthetic
SEAETVLEEMKEVSKRTEEKNKKVEDDDKRSIDELRKKLEKVLREDRRSIEDLERRLKEN

SEQ ID NO: 22110 - protein, 56 aa, Artificial Sequence
  Synthetic
EEVLRTIERLSRENKKKDEDTLRKSKEEHERVREELERVLETSRREHEKVKKRLED

SEQ ID NO: 22111 - protein, 60 aa, Artificial Sequence
  Synthetic
RVEEMLERLRRLHEEVKRRIDEVLRELEEESKRNEERIRRVLERLRDEHRKLKETLDRRN

SEQ ID NO: 22112 - protein, 59 aa, Artificial Sequence
  Synthetic
EEELERLERKSRESIERLKDTLRELKERLKRISDRSDEKLREAEKRSRESIEEVKKRAK

SEQ ID NO: 22113 - protein, 60 aa, Artificial Sequence
  Synthetic
EVEDVMREARKLHKELEDKIRDAARRIRETIDRVKKEDDDSLRKLRKLHEDLKRELEKRN

SEQ ID NO: 22114 - protein, 59 aa, Artificial Sequence
  Synthetic
RDELRKLLEDSKRSIEKVEDDLRKLEEKIKRVIDDNRRKNKELEEKSRKSIRDLEEEVR

SEQ ID NO: 22115 - protein, 60 aa, Artificial Sequence
  Synthetic
EVEDVLRELRKEHDDLRKEITDVLRRLEKLHRELDEEDERSVKRIRELIEEVMRELRKRN

SEQ ID NO: 22116 - protein, 59 aa, Artificial Sequence
  Synthetic
RKDLKALKEDSKRSIDDIRRKLEEARRRSERSIDENRKLNKRVIEKIREIIRRLEEKTK

SEQ ID NO: 22117 - protein, 59 aa, Artificial Sequence
  Synthetic
EVEDVLREAERLHRTLLKEIRDALRRLRKLIEDVKRKDDESLKRLREKLERLKESLERN

SEQ ID NO: 22118 - protein, 59 aa, Artificial Sequence
  Synthetic
REELKKLLEDSKRSLDELRRRLKEVEDRVREAIKKNEDENRKLERRLDKIIEDLERRVK

SEQ ID NO: 22119 - protein, 60 aa, Artificial Sequence
  Synthetic
SEAEKILKEIRDISDRTREELKKVKDEHKTLIDRLREILERALREHDRLAKELEDIKRKI

SEQ ID NO: 22120 - protein, 56 aa, Artificial Sequence
  Synthetic
EEVLREISKIIKDNHDEVTEVLKESEELIRRLRKEVEDVRRTSEKLIRELEERVRE

SEQ ID NO: 22121 - protein, 58 aa, Artificial Sequence
  Synthetic
SEVDDVLRRLEELIKTLEDINRKSLEDIKKLIDDLRKILEDALRKHEKLIRELREMKK

SEQ ID NO: 22122 - protein, 56 aa, Artificial Sequence
  Synthetic
KEFLDRMREEIRRLEEESRKSDETIERLIRELRRRVEEVLKTSTDLIRELEEEVKK

SEQ ID NO: 22123 - protein, 61 aa, Artificial Sequence
  Synthetic
SSVERVLEAVKELAKKLAEDIRRSLEHIRRLLEEVEKKHRDSKEHVRKLLKDLRDIAREKG

SEQ ID NO: 22124 - protein, 59 aa, Artificial Sequence
  Synthetic
DKELKKILDELRKLIRKVLEALRELNKRAKEILDRVAENVKEVNERLERLVRRIAEEIR

SEQ ID NO: 22125 - protein, 61 aa, Artificial Sequence
  Synthetic
SSVERVKEEVEKLLEKLEREIRKSLKTIRELLRELKRKHEESKEHVRRLLEKAEREARRRG

SEQ ID NO: 22126 - protein, 59 aa, Artificial Sequence
  Synthetic
DKKLEEILRRAKELIDRVLEELKKLNEELRRIIEEIVRNVKRVNEKLEKLLRDIKRRID

SEQ ID NO: 22127 - protein, 61 aa, Artificial Sequence
  Synthetic
SSVEEVLRRVKELLKTLKKKHEDSKRTVKELLDDLRKKHEDSKRHVRKLLEELEKRARERG

SEQ ID NO: 22128 - protein, 59 aa, Artificial Sequence
  Synthetic
DKELKRILEEVKELVKRVLENVERVNREVRERLKEVSRNVERVNKEAKELVDEVEERAR

SEQ ID NO: 22129 - protein, 61 aa, Artificial Sequence
  Synthetic
SSVEEVRKRVRDLIKRYREEVEKIKKDVRRLLDELREEVKRSLDHVRKLMEELRRKIKRDG

SEQ ID NO: 22130 - protein, 59 aa, Artificial Sequence
  Synthetic
DKELKRILDELKERLERAKRENEDSVRKLRKLIEEILREIRRLNKEAEDLIREIEERAR

SEQ ID NO: 22131 - protein, 61 aa, Artificial Sequence
  Synthetic
KDVEEVLTRVRELLRRVEEEIRRSEEHIRRLLEELRRKHEESKDSIRKLLEDLEEKVRRRG

SEQ ID NO: 22132 - protein, 59 aa, Artificial Sequence
  Synthetic
RKDLEEILREVEKLVEEVERRLRKLNEELKEILRTIVENVERVNRRLEELIRDIKRRVK

SEQ ID NO: 22133 - protein, 57 aa, Artificial Sequence
  Synthetic
SEVEKIVEEVKKIVEEVERLHRKLLEDLRRVVEEVEDRSRRINEEAKKIVEDLKRRG

SEQ ID NO: 22134 - protein, 55 aa, Artificial Sequence
  Synthetic
EEVLKEIEDRLERLRRRAEEVNDTARKIVREVEESLKRSVESLKKLVDELRETLR

SEQ ID NO: 22135 - protein, 57 aa, Artificial Sequence
  Synthetic
DEVERLLEEAKKIVEEMKRLHEEILREVEEIVRELDEKHDKLLRDAEEIVKELKKEG

SEQ ID NO: 22136 - protein, 55 aa, Artificial Sequence
  Synthetic
EEMRRRLEKLVRDLREKSREVNERIDKLLEELHEKSERVKKTIDDLVEEVKDTLT

SEQ ID NO: 22137 - protein, 57 aa, Artificial Sequence
  Synthetic
KEVEDILREVKKIVDELLRRHRELLERARRIIKRLKEEHDRLLKELEEIVRDLTRKG

SEQ ID NO: 22138 - protein, 55 aa, Artificial Sequence
  Synthetic
EEILRRIEELLKRLRDDAKRVNDELKRLVEELRKRSKEVNDELRRLLKELEDRLR

SEQ ID NO: 22139 - protein, 57 aa, Artificial Sequence
  Synthetic
SEVEEILKEVERRVDELTRRHEELLRKADEIVKDIRRKLEEINKRLKDIADDVRRKG

SEQ ID NO: 22140 - protein, 55 aa, Artificial Sequence
  Synthetic
EEILRRIETLLEELERRSKRVNDELEKLVRELKEELERSKRSIDEILKKVSKDLK

SEQ ID NO: 22141 - protein, 57 aa, Artificial Sequence
  Synthetic
DEVERLLEDLREKVKRLVKKHEDILREVEKEVRRILRTSEEINREAEEIIRELDKRG

SEQ ID NO: 22142 - protein, 55 aa, Artificial Sequence
  Synthetic
EDVLRDVDRLLRELREKSKEVNKRIKELLDKLKTDLERSKEHLERLVKTLKDKLR

SEQ ID NO: 22143 - protein, 57 aa, Artificial Sequence
  Synthetic
DEVEDLVRKLKKRVDDLLAEHKRLLDEAEKIVREVLKKSRESNERNKKVSKEVRERG

SEQ ID NO: 22144 - protein, 55 aa, Artificial Sequence
  Synthetic
EEVLKTLDRLVEELRKASEDVNRELDKLLKDLEKKLRDSIRHLEENHKDVRRALE

SEQ ID NO: 22145 - protein, 60 aa, Artificial Sequence
  Synthetic
DEVEKVLKEIRKRVEDSLRHLEKVNKEAREIVEKVREELRESNERLREIVKTIRDRLEKL

SEQ ID NO: 22146 - protein, 55 aa, Artificial Sequence
  Synthetic
EDVRRTVEELVRRSEKAIEDSRRSIEDLVRRLKEDIERSLRSVEKLVEELTEAIR

SEQ ID NO: 22147 - protein, 61 aa, Artificial Sequence
  Synthetic
SEVEKVLEELRRIVTKSARHLDESNERLKEIIRRLDEKNKEALKRAEDIIRDIDDKLKKLK

SEQ ID NO: 22148 - protein, 55 aa, Artificial Sequence
  Synthetic
KKVKDEVKKLIDDSREKIKRSRESVKRLVEEHRRRSEEVRKTLEKLAREITERIR

SEQ ID NO: 22149 - protein, 57 aa, Artificial Sequence
  Synthetic
DELEEVADEVRKIIEDLERRLREVVKTSEKLNKENRRRTEDVEKEVEKILRELEEKL

SEQ ID NO: 22150 - protein, 59 aa, Artificial Sequence
  Synthetic
DEDIRKVLKELREIIKEVEDMLKEVLDRNRKLIEDNLRRLKEVLDRLRKKVREIEEEAR

SEQ ID NO: 22151 - protein, 58 aa, Artificial Sequence
  Synthetic
SEIEEAEERVRRLIERNKRETDRVAEEVKRINDENRRATEKVKRDVKRILDDLRRKLE

SEQ ID NO: 22152 - protein, 59 aa, Artificial Sequence
  Synthetic
DKLLRDVLRDLERLVRKNLEELKRVLDELKRLMEDNLRRLEKVLEELERLVREIVERAR

SEQ ID NO: 22153 - protein, 58 aa, Artificial Sequence
  Synthetic
EELERVAKKVRDINRRNKEETKRVEDEVRRLIKENEDTSREVVRRNEEILKDLERKLG

SEQ ID NO: 22154 - protein, 59 aa, Artificial Sequence
  Synthetic
RDVVREVLERLKELVKRNLDKLKRVLDEIRRLIEENLDELRRAHEEHRRIAEDIRRKAK

SEQ ID NO: 22155 - protein, 57 aa, Artificial Sequence
  Synthetic
ESLERVKEEVKKILEKNRRTSEEVARRVKELIDRNREKSKDVARKNEKILEDLERKL

SEQ ID NO: 22156 - protein, 59 aa, Artificial Sequence
  Synthetic
EEEVERVLRRLRELVRENEKRLKEVLDEIRRLIRENEEKLEKAHREHKKLAEEVERRKR

SEQ ID NO: 22157 - protein, 59 aa, Artificial Sequence
  Synthetic
DDVERVLKEVRELVERANEEIRKVLERDRKSNEDANRKIREVLRRVEELVDRIDKIRRE

SEQ ID NO: 22158 - protein, 55 aa, Artificial Sequence
  Synthetic
DEVVKKIKELLDRHRKTTEEVLERIRRSLEKHRRDSEEVMKELRRLVKELEDRTR

SEQ ID NO: 22159 - protein, 59 aa, Artificial Sequence
  Synthetic
DEVRELLRTIEELVRDANRKIKEVLDRDRESNDRANKTLEEILKRDKRSNEDVEEKLKK

SEQ ID NO: 22160 - protein, 55 aa, Artificial Sequence
  Synthetic
KKVEKKIRDLLKKHEEDSRKALEDIKRSLERHRERSEEVLKRIRDSLRELDKKTK

SEQ ID NO: 22161 - protein, 59 aa, Artificial Sequence
  Synthetic
DSVEEILKRVKELVDKANEKIKEVEERVRRSDEELKKILEEILREIEKLVREVEEIARR

SEQ ID NO: 22162 - protein, 55 aa, Artificial Sequence
  Synthetic
DEVKKKIKDLLEKHERDSRKVLRKLEESSKETEDRAKEVLERIEKLLEDLRRETK

SEQ ID NO: 22163 - protein, 59 aa, Artificial Sequence
  Synthetic
KDAEELLKRVRDLLKRSLESLEKILRDSKELADRWRKKLEDLLRESEELVDRAEKILRR

SEQ ID NO: 22164 - protein, 55 aa, Artificial Sequence
  Synthetic
ERVREELKKLLTRVEEEHRKVLETDKKLLKELHKESKEVNDRDRELLERLEESVR

SEQ ID NO: 22165 - protein, 59 aa, Artificial Sequence
  Synthetic
KDAERLLRELKKLLEESLKSLKELTDRIRDEVRRVKKRLRDLLRESEELVKRAEDILRR

SEQ ID NO: 22166 - protein, 55 aa, Artificial Sequence
  Synthetic
EEVEETAKKLLDEVRRAHEEVLKEIRELLRDLERTVREVNEEDKKLLRKLEEDVR

SEQ ID NO: 22167 - protein, 56 aa, Artificial Sequence
  Synthetic
SEAEKVRKDLKDIADDLHRVSERVLREDERLLKRLHDVSRDVRERDREIVEDLRRG

SEQ ID NO: 22168 - protein, 55 aa, Artificial Sequence
  Synthetic
EEVLDRARKEVDEIKKKHKKVLDESRKLVAEAERKHEEILKESEDLAREIKERER

SEQ ID NO: 22169 - protein, 56 aa, Artificial Sequence
  Synthetic
SRAEKVREDLDRIEEDLRRVHREVLKEVERILKELHDTSKRVRDEVEKIVRDLRRA

SEQ ID NO: 22170 - protein, 55 aa, Artificial Sequence
  Synthetic
EKVLEDARKLVRESKENIRRVLEDLKRIVKKLKEDHKRILDELKKLVDKIKEDAR

SEQ ID NO: 22171 - protein, 56 aa, Artificial Sequence
  Synthetic
SRAERVREEIDKILEDLHRVSERIKRELTKLMEDLERTHERIKKAIREILADLRRR

SEQ ID NO: 22172 - protein, 55 aa, Artificial Sequence
  Synthetic
EEVLKEAKKLVDDLKEKHKEVLTRVERLVEESKKNLKRVLDELRDLVRRVKEEAK

SEQ ID NO: 22173 - protein, 56 aa, Artificial Sequence
  Synthetic
SEAERVREELDKIVEDLHRTSEDVKRRDEELLKDLERRHKEVKEEDEKILKDLRDS

SEQ ID NO: 22174 - protein, 55 aa, Artificial Sequence
  Synthetic
ERVLEELRKTVTEMKKRHRDILRESEELARESKENVDRVLEESRRRAEEIKRRAK

SEQ ID NO: 22175 - protein, 56 aa, Artificial Sequence
  Synthetic
DERERVKEELDKLLRDLERVHDKVREDDKRLLDDLRRVHEKARRDDKRILDELKRA

SEQ ID NO: 22176 - protein, 55 aa, Artificial Sequence
  Synthetic
EEVLERAKELVKRSKENVERVLRDSERLAKESKENVRRVLEESKRRVEEIEERAR

SEQ ID NO: 22177 - protein, 56 aa, Artificial Sequence
  Synthetic
SEAERVREELKRILEDLERVHREVEEAIERIVEELEDVHRRARERVERILRELERR

SEQ ID NO: 22178 - protein, 55 aa, Artificial Sequence
  Synthetic
EEVLKEIEKMVKESRDTVRRILEELRELVERSKRNVEKVLRDLERAVEKIERDAK

SEQ ID NO: 22179 - protein, 56 aa, Artificial Sequence
  Synthetic
KEAEDARRRVDEILEELRKLHDEVRKTDKELLDDLEREHERVKREDDKILDTLRRQ

SEQ ID NO: 22180 - protein, 55 aa, Artificial Sequence
  Synthetic
EKVLEDLERLVETSRKTVRDILEESKELVKRSKENVRRVLERSKELVKRVSERAK

SEQ ID NO: 22181 - protein, 60 aa, Artificial Sequence
  Synthetic
SDVDEARKTVKKILDESEETLERVRRELERILRDSERTLKRVEERVRRILRDLERELRKL

SEQ ID NO: 22182 - protein, 59 aa, Artificial Sequence
  Synthetic
REEIDKVLKEIRERVERSKKHLEDVLDRLRKIIEESKRHVEKVLEKLEKIVKELKDELK

SEQ ID NO: 22183 - protein, 60 aa, Artificial Sequence
  Synthetic
KDIEEVEKRVREILEDSRRMSKKDEESTRRILEESRRVSEEDKKSTEEILKELKDELRKL

SEQ ID NO: 22184 - protein, 59 aa, Artificial Sequence
  Synthetic
RDTIKKMLEEIKRRVDESKRHLRESNKRIRDIAEESKKHLEDSNKKVRDRADELKKRLK

SEQ ID NO: 22185 - protein, 60 aa, Artificial Sequence
  Synthetic
SDLERVKKAVEDILRDSERTLRRARERLKRLLEELRRTSEEDKKSTDEILERLKRELEKL

SEQ ID NO: 22186 - protein, 59 aa, Artificial Sequence
  Synthetic
RDELRKLLEEIRRRAEESKRHIEEVLKRLEEIVKRLKEELKRSNDEIREIVRRLEEELK

SEQ ID NO: 22187 - protein, 57 aa, Artificial Sequence
  Synthetic
STLEEMEKEVEKLNRDSRRTLREVAERVEELNRDNERTSKRVEDAVRELNKRLRDEV

SEQ ID NO: 22188 - protein, 59 aa, Artificial Sequence
  Synthetic
EEELRKVLKENEELARELKKELERALEENRRLHEENKEDLRRVLEENERLHRKLRKDAK

SEQ ID NO: 22189 - protein, 57 aa, Artificial Sequence
  Synthetic
DTLERVAEAIRRLNEDLKRTLEKVERAVREILKRLAETLKRAEEEVRRLNRDLERKV

SEQ ID NO: 22190 - protein, 59 aa, Artificial Sequence
  Synthetic
EEEIKKVLDDNKKLAEDLKRELKRVLEEIRKLVKELEDIVREVLKTNKELHERLKRRAD

SEQ ID NO: 22191 - protein, 57 aa, Artificial Sequence
  Synthetic
DTLERAAEEVKKLNEDNKRTSKRVEDEVRRLNRENEEMSKRVKDTVKKILDDLRRKV

SEQ ID NO: 22192 - protein, 59 aa, Artificial Sequence
  Synthetic
EKEIERVLRELERIARENKKELEKVLRENRELHERNKKLLEKVLRDIKRLAKTLRDRTR

SEQ ID NO: 22193 - protein, 57 aa, Artificial Sequence
  Synthetic
RELEEARERVKRLNEENKEFSRRVAEEVKKLNEENERTSKKVEDEVRKLNEDLRKKV

SEQ ID NO: 22194 - protein, 59 aa, Artificial Sequence
  Synthetic
EETIKRVLEELTRIMDRNRKDLRRVLEENKKLHDENRKELKRVLDENRRLHEEVKKRAK

SEQ ID NO: 22195 - protein, 57 aa, Artificial Sequence
  Synthetic
SELERVKTEVEKLNRRNREATERVKEEVKKLDEENKKSSKRVEDEVRKILDELRKKV

SEQ ID NO: 22196 - protein, 59 aa, Artificial Sequence
  Synthetic
REELERMLKRLKEIIERNEERLKEVLDRIRELIERNKELLRRVLKRIRDLVKELKERAD

SEQ ID NO: 22197 - protein, 57 aa, Artificial Sequence
  Synthetic
RELEEVERRVRELNEDNRRKTEEVKREVKRIDDDNRRASERAAREVKKLNKDLKDKV

SEQ ID NO: 22198 - protein, 59 aa, Artificial Sequence
  Synthetic
EKTLEDMLRRLKEIIKRNKDELEKVLRDIKKLVDDNKRDLERVLRRNEELHRELLERAR

SEQ ID NO: 22199 - protein, 57 aa, Artificial Sequence
  Synthetic
DELERAKEEIERLNDELKKSLEEVEKEVEKLDDDNRRTSRRVSEEVKRLNKELEDEV

SEQ ID NO: 22200 - protein, 59 aa, Artificial Sequence
  Synthetic
RDTIRKVLKENEDLIRKLEEILKKVLDEIRRLIEDNKRELEDMLRKNKELHDRLRERAR

SEQ ID NO: 22201 - protein, 57 aa, Artificial Sequence
  Synthetic
SELEEVKKEVEKLDERNKRLSKRVEEEVRKLNEENKRATERIKREVEKILEDLRRKV

SEQ ID NO: 22202 - protein, 59 aa, Artificial Sequence
  Synthetic
REELKRMLDRLRRIIEENERKLKEVLDRLRDIIRKNKEDLKRALERIKKLVEDLKRRAT

SEQ ID NO: 22203 - protein, 59 aa, Artificial Sequence
  Synthetic
SDLERVLDEIRRLAKEVKDTLRRMLEKNEELSKRDEDKTREMLKEIERLVKELEEIADK

SEQ ID NO: 22204 - protein, 59 aa, Artificial Sequence
  Synthetic
DDRLRKAEEEIKEIERDLKRTLDEVAKEVKRTIDRNRETSKRAAREVEKLLEKLREKTR

SEQ ID NO: 22205 - protein, 59 aa, Artificial Sequence
  Synthetic
SDLERMLREIRKLVEDDKRRTREMLRDNERLSREDKKKTDDVLRRLEELVRRLEEILKK

SEQ ID NO: 22206 - protein, 59 aa, Artificial Sequence
  Synthetic
DKRLDDIRRAIEEIIRDLRRASKKASEDVERTIERNERTSEEAKRRIEELIERLRRTDK

SEQ ID NO: 22207 - protein, 59 aa, Artificial Sequence
  Synthetic
SDLEEALKRVEKLVRDDKEKTKRMLERNRELVKRNKEKNKRMLDEIRRLVEELEDILRR

SEQ ID NO: 22208 - protein, 59 aa, Artificial Sequence
  Synthetic
DKRLKEVEDAVREILKDLKRTSERAKEEIERTIRDNERVVRRLEEEARKILEDLERRDK

SEQ ID NO: 22209 - protein, 59 aa, Artificial Sequence
  Synthetic
SRIEELLKTVEKLVDEVKKALRKLLEENKDLARKSKESLERLLDEVRDLVRRLEEILDR

SEQ ID NO: 22210 - protein, 59 aa, Artificial Sequence
  Synthetic
KDKLERVMRTLDEILKDLERTVERVKRALDESNRDLRREHERIKKELDKILDRLREKAR

SEQ ID NO: 22211 - protein, 56 aa, Artificial Sequence
  Synthetic
SEVERLKEELDKLHKENREVLEDSKRSLDKILDDVRKLAEDVKKRLDDILKELRDR

SEQ ID NO: 22212 - protein, 59 aa, Artificial Sequence
  Synthetic
RDLLRRLLREAERVSEETKKESKKLNDEIRKVLERLRDELRKIEDEIRKVVRRIRERAN

SEQ ID NO: 22213 - protein, 56 aa, Artificial Sequence
  Synthetic
DEVETLKKRLDKLHEDNKRDLERSKRSLEELLKELEEVVRRSEKTLDELLKKVEDQ

SEQ ID NO: 22214 - protein, 59 aa, Artificial Sequence
  Synthetic
RKLLKELEDTIRKVSDDTRRKSEELNEELKTVAEEIKKRSRELNEEAKDVLEKVERRTT

SEQ ID NO: 22215 - protein, 57 aa, Artificial Sequence
  Synthetic
DEVERAKEKLDKILEDLRDVVRRSKENLDRLHEENRETLERSKKNLDRLLEKVKKDG

SEQ ID NO: 22216 - protein, 59 aa, Artificial Sequence
  Synthetic
RRDIERILRELEKVLKKLTDESERLNREVERVSRDTKKKSKELNEELKRVLDEVKRKAD

SEQ ID NO: 22217 - protein, 60 aa, Artificial Sequence
  Synthetic
DEVREVLRELKKVVDDSKRDLDRVLREAERVVKESKDDIKRLLEETERVARDVERKIREN

SEQ ID NO: 22218 - protein, 55 aa, Artificial Sequence
  Synthetic
ETLDKEVKRLLKESKRAADELRERIKRLIEESKRLLDTVRREDKKILEKIERDLK

SEQ ID NO: 22219 - protein, 57 aa, Artificial Sequence
  Synthetic
DEIEKILEDLRRISEDTKRKHEEILRELEEILRELEERHRRILREVEEVARRLEERL

SEQ ID NO: 22220 - protein, 59 aa, Artificial Sequence
  Synthetic
EEKVKEVEREIRRLLKENEDASREVERLIEELKRRLDKISEDVERVLKKILERIDRATK

SEQ ID NO: 22221 - protein, 56 aa, Artificial Sequence
  Synthetic
RSVEEAEKVLEELKRRNERLNEEHRREVEKVREKNERLNKRHREDVERIKRELDKE

SEQ ID NO: 22222 - protein, 59 aa, Artificial Sequence
  Synthetic
DETIKDVLRKIKKISDETRKTLEDTLRELREISEKTRRRLDESLKELEEILRRLKEETR

SEQ ID NO: 22223 - protein, 60 aa, Artificial Sequence
  Synthetic
REAEEIRKEVEKLLRDLKRALDEHRETSRRLVEELKDILRKNREEVERLVREIREVIKRV

SEQ ID NO: 22224 - protein, 55 aa, Artificial Sequence
  Synthetic
RELIEEITRIVEKAKKELREVSKRLREIVKKIKEDNDRSNKRLREIAKEIKDRLT

SEQ ID NO: 22225 - protein, 60 aa, Artificial Sequence
  Synthetic
SEREEARERVKDLSRKLKEINERSEKHLRDLAKENRDANRRTREEVERLLDKIRKVIKDV

SEQ ID NO: 22226 - protein, 55 aa, Artificial Sequence
  Synthetic
EELIRELEKIVRDAEKKNRDVNREVRKILEDSKRELEKVLRDLERKVREIEKELK

SEQ ID NO: 22227 - protein, 61 aa, Artificial Sequence
  Synthetic
RELEEVLKKLKEDAERLKRILEEATRELEKILERLHRLNEKSTEELRRIVKDLKEELKRRG

SEQ ID NO: 22228 - protein, 55 aa, Artificial Sequence
  Synthetic
EEVEKTVRKLEEDLKRAIEKHEEDSRRLVKRLKESNDEHEKESRRLVRELEKEIE

SEQ ID NO: 22229 - protein, 59 aa, Artificial Sequence
  Synthetic
DEVREVIKTVRKLLEDLHRTNREVIERVKRTSEETHRKNEDMLRRLRKLVEDLKETLDR

SEQ ID NO: 22230 - protein, 59 aa, Artificial Sequence
  Synthetic
EKSLRDAEREVKKLLEELKRSLDKLREDVERLLRENKESLDRLREEVKKIERELREKTR

SEQ ID NO: 22231 - protein, 59 aa, Artificial Sequence
  Synthetic
SDVDRVLEELRKLVEELHRRNRKIIEDLRRASEKTHRKNRDLLEKAKKLADELREIAER

SEQ ID NO: 22232 - protein, 59 aa, Artificial Sequence
  Synthetic
KDELRRLEEAAKKILDDLEDSLRKLEEAVKDLKRKNKKSLDDLAEAAKDILRRLAETAR

SEQ ID NO: 22233 - protein, 59 aa, Artificial Sequence
  Synthetic
DEAEEVIKTVKRLLDELHRRNEEAIKEDRRLVEELHRTNEKVLREVEELVKRLAEILRR

SEQ ID NO: 22234 - protein, 59 aa, Artificial Sequence
  Synthetic
KETLDRLRERAEELKRRLEKSLRDLNRDNERTKRELRESLRKLEETARRLKEEIDRRTK

SEQ ID NO: 22235 - protein, 60 aa, Artificial Sequence
  Synthetic
DEADDLIRRVRELVKRVKEALEDLLRRNKDVLRKVKEELEKITRRNRDKVRRVEEELKRI

SEQ ID NO: 22236 - protein, 59 aa, Artificial Sequence
  Synthetic
SRKLEELRKEVEKLKEELDRVLEEARKEVEKSNRELKEVLERHAEDNERIKRRLDEARR

SEQ ID NO: 22237 - protein, 60 aa, Artificial Sequence
  Synthetic
SELERLLDEVDRIVREIEERLRDILRKNRELSEDSERKLRELLREVRDLVRRIMDELRRT

SEQ ID NO: 22238 - protein, 59 aa, Artificial Sequence
  Synthetic
REKLEEARRRIDEIRRRLEELLKRAREDSDRSNKRNKDLLREIEEELKKLKRELDEETR

SEQ ID NO: 22239 - protein, 60 aa, Artificial Sequence
  Synthetic
SLKEKVKKVIEDLKRAIDDLLRKVREESKKSNDHIRKLLEDSERTLRDLARRIKKLKDDG

SEQ ID NO: 22240 - protein, 59 aa, Artificial Sequence
  Synthetic
ARLIKEVIEEAERLLREIAKRIRKVIEEDRDLNRRIAKKLDELNRRAEELLKRIADRAK

SEQ ID NO: 22241 - protein, 59 aa, Artificial Sequence
  Synthetic
SSKETVKDVLRKITKRIRDLVRESKKTSDESNKHIKELLERSKKTIDELERRIEDLRRR

SEQ ID NO: 22242 - protein, 59 aa, Artificial Sequence
  Synthetic
EELLRRLIKELEDLMREIERKLRELNERDKRLNEEIAKKLEKLNRDARKLVEEIERRAR

SEQ ID NO: 22243 - protein, 59 aa, Artificial Sequence
  Synthetic
KLREDLEEMLRRSEKHIRDLVKRSEETSRDSNRHIEKLLKDSRKTIEDLKRKIEDLARK

SEQ ID NO: 22244 - protein, 59 aa, Artificial Sequence
  Synthetic
RELLERLIRELKRLNEEIAKKLEDLNREDRRLNEEIAKRLRDLNEELKKLVEDIERRAR

SEQ ID NO: 22245 - protein, 60 aa, Artificial Sequence
  Synthetic
RSKEEVDKMLERLRERIEKLVEESRKTSKESNEHLEKLFRESEETIKELKKRIEDLRRKG

SEQ ID NO: 22246 - protein, 59 aa, Artificial Sequence
  Synthetic
EDLLEKLIRELEELIRRIEKKLRDLNREDRELNKRIADEIERLNREARRLIEEIRKRAE

SEQ ID NO: 22247 - protein, 59 aa, Artificial Sequence
  Synthetic
SLEEEVRREIERSRRHIEKLVRDSERTSKESNKHIKKLLDESKRTLDEIRKRIEDLARK

SEQ ID NO: 22248 - protein, 59 aa, Artificial Sequence
  Synthetic
REVLKELIRELRRLNEEIRKKLEKLNDEDRRLNEEIRRKLEEINEELRRLVREIEERAR

SEQ ID NO: 22249 - protein, 60 aa, Artificial Sequence
  Synthetic
SLEETVEEVLRRLRRKIEKLVTESEETIRRSKKHIEEVLEKSKRTLDKIKEDIDRLRKEG

SEQ ID NO: 22250 - protein, 59 aa, Artificial Sequence
  Synthetic
REVLKELIDRARELIERIARKLTELNKENRKLNEEIARRVEELNKELKRLLKEIEDRAR

SEQ ID NO: 22251 - protein, 60 aa, Artificial Sequence
  Synthetic
STKETVARELERSRKHLEDSFREAERAIKESEEHIRELLERSRRTLKEIEDRIRDLRRRG

SEQ ID NO: 22252 - protein, 59 aa, Artificial Sequence
  Synthetic
ERLLRELIEELRRLNRKIHEDNRRLIEDNKRLNEEIKRELDKLNRELERETEEIKKRAD

SEQ ID NO: 22253 - protein, 57 aa, Artificial Sequence
  Synthetic
SVRETLREVLKESKKHLDDLVRRVKEEIERSKKHIDDLIRRNKESLDDIRRTVEEKI

SEQ ID NO: 22254 - protein, 59 aa, Artificial Sequence
  Synthetic
SDLVRELIKRLKEINDRVAERIKDIIRKVREANKDLERKLRELNKRSRDVLEEVVRAEE

SEQ ID NO: 22255 - protein, 57 aa, Artificial Sequence
  Synthetic
SAAEEAEKASKDSEKHIKDLIRRLREVSEESRRHLRRLIEENKRSLEEIEKEVRKKV

SEQ ID NO: 22256 - protein, 59 aa, Artificial Sequence
  Synthetic
TELIKRIIDRNREINRRVAEAIKKIIKDNRDINEDLERKLRKLNEESKRVLDDVVRREK

SEQ ID NO: 22257 - protein, 57 aa, Artificial Sequence
  Synthetic
SVEERLKDELRKSEEHLRRLIRELEKALEDSKRHADRLIKENRDSLRRIEDKARKKI

SEQ ID NO: 22258 - protein, 59 aa, Artificial Sequence
  Synthetic
DETVKRIIEENRRINEDLARKIKEIIRDNKRFNEEVEEKLKRLNDTSEEILRRLVRRDE

SEQ ID NO: 22259 - protein, 57 aa, Artificial Sequence
  Synthetic
SVDKELEEVIRRSKDHLEKLIKEAEDALKRSEEHLRKLIEEVKRRLEEVEKRVREKV

SEQ ID NO: 22260 - protein, 59 aa, Artificial Sequence
  Synthetic
SELIKRLIKENKEINEKLAREIEEIIKENKRINDELKKRLEELIERLERILEEVERRER

SEQ ID NO: 22261 - protein, 57 aa, Artificial Sequence
  Synthetic
SVDRTLEEVIKDSRRHVKELIDRLEKVIKESEENVKRTVDDNERSLKEIADTVRREI

SEQ ID NO: 22262 - protein, 59 aa, Artificial Sequence
  Synthetic
SEDIKRLIDTNRKINRDVAETIKEIIKEVRKINKEIDDKARELNKESRRVLEEVVRAER

SEQ ID NO: 22263 - protein, 57 aa, Artificial Sequence
  Synthetic
SVAETLRKVLKESEENVKRTVDRAEEELKKSEEHLRRLVERLKEVLEDVRRRVEEEV

SEQ ID NO: 22264 - protein, 59 aa, Artificial Sequence
  Synthetic
DERVERIIRELREVNERLDREVERLIRENREINRRLAEEIKDLIRRLREILREVVERAK

SEQ ID NO: 22265 - protein, 57 aa, Artificial Sequence
  Synthetic
SIAEKVEKVLKESKENLDETIRRAEEDLKRSRDHLRKLIEENKRSLDRIKEEVDRRI

SEQ ID NO: 22266 - protein, 59 aa, Artificial Sequence
  Synthetic
SDAIEKLITDLRKINEEADRKVKEIIKRNRDINKKVEDDLRELNKESTTVLREVVERER

SEQ ID NO: 22267 - protein, 60 aa, Artificial Sequence
  Synthetic
SELEKIIEDARRVLEEDERRNREVNRKLRKILEDNERLNREVNKRLREILKRLKEELKRL

SEQ ID NO: 22268 - protein, 55 aa, Artificial Sequence
  Synthetic
EEAKRALDKIREDVRKILEDTKRELEDVRRRVEEILRETREELKRVEDDVKRAED

SEQ ID NO: 22269 - protein, 60 aa, Artificial Sequence
  Synthetic
SELEDIIRKLDEILKRNEEENRRVIRRLRELLEEDERRNRKAIEDLERIITKLKDDVRKL

SEQ ID NO: 22270 - protein, 55 aa, Artificial Sequence
  Synthetic
RDAERRIREVEEEVKRILEETEEVLRDVKRRVDEILKTTEDRIREIEEEIKRTVK

SEQ ID NO: 22271 - protein, 60 aa, Artificial Sequence
  Synthetic
DELRDIIRELRDILRENKKRNEDAIRKLRKILKENEKKNRDAIRELEDILEKLRKEIEDL

SEQ ID NO: 22272 - protein, 55 aa, Artificial Sequence
  Synthetic
RKVEEDIKRVEEEVKKILDKTDEELKEVERRVRKILRETEEELKRVEDEVRRAKT

SEQ ID NO: 22273 - protein, 60 aa, Artificial Sequence
  Synthetic
REEEKARRVMEKLKRDVDRINTRHRDILKKIEDEVRRIDEEHKTEVKKIKDRAEEIIRRI

SEQ ID NO: 22274 - protein, 55 aa, Artificial Sequence
  Synthetic
KDLIREVEKILKDIEDLVRESERELREILKDIKRMVDESLKRLEDILRELEERTR

SEQ ID NO: 22275 - protein, 60 aa, Artificial Sequence
  Synthetic
REEEEMRKVVKDLEDAARELDRDHETKLRRIEEEVKKLNEEHKRELERIARRIKEIIDRI

SEQ ID NO: 22276 - protein, 55 aa, Artificial Sequence
  Synthetic
KDLIRRLEEILRRIARELEDSLRKLEKILEEIKEIVKKSLDELRRIVDELEKRVR

SEQ ID NO: 22277 - protein, 60 aa, Artificial Sequence
  Synthetic
SEEEEVRRVLKRIAEEVKRLDEDHRRILEEIRKKVEKSSRDHKRELDKIKRDADEIIRRI

SEQ ID NO: 22278 - protein, 55 aa, Artificial Sequence
  Synthetic
KDLIKKLEEILEEIRRLLEESLRELEDILKKVHDRNARTLERLREILKEIEDRAR

SEQ ID NO: 22279 - protein, 60 aa, Artificial Sequence
  Synthetic
DEKRKVDKRLKEIEETIRRLLEEHRRELDEIRKRIEEISRRHRKELEDIEREVRKIISRI

SEQ ID NO: 22280 - protein, 55 aa, Artificial Sequence
  Synthetic
EDLIRDVERVMREVKRDLERSLEELRDVVRRAEEEVRATLRKLREILKKVEDETR

SEQ ID NO: 22281 - protein, 60 aa, Artificial Sequence
  Synthetic
SEEETMRKVVKEIREKVRRISERHKEELERITDALRRSSKRHEDELREIEKAVREIIRRI

SEQ ID NO: 22282 - protein, 55 aa, Artificial Sequence
  Synthetic
DKLIRELEEILERLEREVRKSLDRLRKILEDIHRTNKDTLDRLREILKKVEDRTR

SEQ ID NO: 22283 - protein, 59 aa, Artificial Sequence
  Synthetic
SEVEEVIRRLEELVDRLHKINKRAIEENERLNRELHEKNRDIIRKLKELVERLRDIKEK

SEQ ID NO: 22284 - protein, 59 aa, Artificial Sequence
  Synthetic
KETADRARDEVRRIEKELDDSLRELEKRVRDSKRHLDRSLEELEKVVDEIRKELEDLAK

SEQ ID NO: 22285 - protein, 59 aa, Artificial Sequence
  Synthetic
KEVEEVIKRLRELVDRLEKENRDVNEDNKRLNEELHDRNRKMIEELRRLVTELEDIRRK

SEQ ID NO: 22286 - protein, 59 aa, Artificial Sequence
  Synthetic
KDLLKRVEDEARKIEEKLKRIHEETKKVADDSERHLRKSLRELEKVAREIKKRLEEERK

SEQ ID NO: 22287 - protein, 59 aa, Artificial Sequence
  Synthetic
DEVREIIKDLRRLLKELEERNREINDRNKKLNDTLRKELEDIKRRLEKLLRELEKIVRE

SEQ ID NO: 22288 - protein, 59 aa, Artificial Sequence
  Synthetic
EEVLRRVEEEVRDIERRLDKIHEDTRDTAEKSERHLDALLRDLERVAREIEEALDRLKD

SEQ ID NO: 22289 - protein, 59 aa, Artificial Sequence
  Synthetic
SEVEEVIRRLRELLRTLEEENRKMIRENERLLEELKKRNEDIERELRKLVTELAKIADK

SEQ ID NO: 22290 - protein, 59 aa, Artificial Sequence
  Synthetic
EKLARELREVAERIKKRLDEIDETTRRMVTESIKRLEEIDKRTTERAREIKKELRDRAT

SEQ ID NO: 22291 - protein, 59 aa, Artificial Sequence
  Synthetic
SEVEDLIRRLEELLDRIRRDNERIIKELEELLRELEETNKRLIERIRKLLEDLRDTVRK

SEQ ID NO: 22292 - protein, 59 aa, Artificial Sequence
  Synthetic
EKLMREAKEAVDRIKKRLDEINKRTEDVARRIRKRLDEIDERTKEEAKRIKEELDKEEK

SEQ ID NO: 22293 - protein, 59 aa, Artificial Sequence
  Synthetic
SEVEELIERLKELLERLEELNRRVNEENRRLNEELERRIRKAIEDLKDLLRRLDDIRRR

SEQ ID NO: 22294 - protein, 59 aa, Artificial Sequence
  Synthetic
EKKLRELKEVVDRLKKEIKRIDEETRKEAERSKRNLEKILRDLEREAKRLKEEIDKKAR

SEQ ID NO: 22295 - protein, 59 aa, Artificial Sequence
  Synthetic
DEIRDLLRRLRELNKRIADRIRKLNEENKKLNKEVADKIRKLNREAREIIKTIAEIIKS

SEQ ID NO: 22296 - protein, 59 aa, Artificial Sequence
  Synthetic
KEVLDRAKEEVDRSRKHLKELLDRSRETSDRSRRHLKDLMRRSRETIRKLDEELKRLEK

SEQ ID NO: 22297 - protein, 59 aa, Artificial Sequence
  Synthetic
SEIEKLIREAERIIEEIAKEIKDLNEENERLNREVDKRLTDLNRRAKELLEEVKRIIDR

SEQ ID NO: 22298 - protein, 59 aa, Artificial Sequence
  Synthetic
EEKLRDARREIERLRRELEKLLEDSRRTSEESRRNLERSLDESRKTIEELIKRLDDAER

SEQ ID NO: 22299 - protein, 59 aa, Artificial Sequence
  Synthetic
SEIEKLIEDAKRILEEVARRLKKINEDNDRLVRKIADELRRLIEEAKKILDEIKKIIED

SEQ ID NO: 22300 - protein, 59 aa, Artificial Sequence
  Synthetic
EDVLREVRKVIKKLRDELEELARRSRKTSEDSRKRLDDLLKRAREVIEELKKRLEDLRR

SEQ ID NO: 22301 - protein, 59 aa, Artificial Sequence
  Synthetic
KDIEKLIKDLEKLNRDIAKRIRDLNETNKKLVRDVAEEIKRLNEELKKLLEDIRRIIER

SEQ ID NO: 22302 - protein, 59 aa, Artificial Sequence
  Synthetic
EEVLKRAREMVKRSKEHLDELLKRSEDTSRESKRRLEKLLKESEDTIRRLEEELKKAEK

SEQ ID NO: 22303 - protein, 59 aa, Artificial Sequence
  Synthetic
KEIEELLEEIERILREIKKDLERINKENEKLNREVKKKIEDLIREVRKIIEEIRRIIER

SEQ ID NO: 22304 - protein, 59 aa, Artificial Sequence
  Synthetic
ERKLKEVRDTIEELKKRLEKLAKESRDTSRRSRENLERLAREFREEIKRLKKELEEART

SEQ ID NO: 22305 - protein, 59 aa, Artificial Sequence
  Synthetic
SEIEKLIRDAEKILEEIAELIKRLNEENKELNERVAKRIKDLNEELRRLLKEIADIIRR

SEQ ID NO: 22306 - protein, 59 aa, Artificial Sequence
  Synthetic
REELEKVRKVIDKLREELKRLERESERTSEESRRNLERLLRESRKTVEEIKKRLDELRK

SEQ ID NO: 22307 - protein, 59 aa, Artificial Sequence
  Synthetic
SDIERLIAELEKLNKEIEDKIRELNRENRRLNKEIDEEIERLIEEARKIIEDIREIIRR

SEQ ID NO: 22308 - protein, 59 aa, Artificial Sequence
  Synthetic
RKKVEEARKKIEDSKRHLEELLRDSRRTVKESNDNLRRSAEKARREIKRLEEALKELRR

SEQ ID NO: 22309 - protein, 60 aa, Artificial Sequence
  Synthetic
DEVEKVVRELEEVLRRNKELLEKTKKETKEALDRNRELLEDTKRKTREILERLKKVIKEG

SEQ ID NO: 22310 - protein, 59 aa, Artificial Sequence
  Synthetic
EEVVKRLRDILRRVKEAAEELHRDDERELRRVEKELEELHKDDRRVVEEVKDDVRKAEK

SEQ ID NO: 22311 - protein, 60 aa, Artificial Sequence
  Synthetic
SDAERVVRELRKILKEIEDTIRKSKKETKEMLDRNRELARKVKEELKEILRRLEKMKRDG

SEQ ID NO: 22312 - protein, 59 aa, Artificial Sequence
  Synthetic
ERLLRELRRIVEEVKRAVEELNRDDRRTLERVKREAKKIHEDLRRVVEKLERDVEEARR

SEQ ID NO: 22313 - protein, 60 aa, Artificial Sequence
  Synthetic
DEVEKLKRELDKILEDLERLHRRLEEELRRIHEENRDLSRRTKEELDRILKRIEELLRER

SEQ ID NO: 22314 - protein, 59 aa, Artificial Sequence
  Synthetic
EKVLEELRRILRRVEEAVRRLNERSEEVLRDVERRDEELNEDNKRRLEEVKKRVEDLLR

SEQ ID NO: 22315 - protein, 60 aa, Artificial Sequence
  Synthetic
SELDELKKSLEEIHRRDREKNRKLKEDLKRILDEIRKRLEESKKRLEEILREIERLLRER

SEQ ID NO: 22316 - protein, 59 aa, Artificial Sequence
  Synthetic
EKALKELRKILEDVARANEELNRDTRRTLERVEEEVEKLNRDHKRVLEKVERDVRRLTK

SEQ ID NO: 22317 - protein, 60 aa, Artificial Sequence
  Synthetic
SEVERLKEELKRILEEIKKLVDDSKKDLERIHREDKKKNEDLKKRAEEILREIRDLLTKR

SEQ ID NO: 22318 - protein, 59 aa, Artificial Sequence
  Synthetic
EKLLRDLRRVLEEVKRAVDEISKDHKRMLDAVKKANEELNDDSRRVLERVDREVKKAEK

SEQ ID NO: 22319 - protein, 61 aa, Artificial Sequence
  Synthetic
SELDRVREEAKRIDDENRKRSEDSVRDSERLLREIEELHRETKERSEELLKRVEEIVRDRG

SEQ ID NO: 22320 - protein, 59 aa, Artificial Sequence
  Synthetic
DRLLEELEKVLRESARRNERIITENRRTMKRVSEEVEKLNRDDKRRMEELEKRAREIIT

SEQ ID NO: 22321 - protein, 61 aa, Artificial Sequence
  Synthetic
SELERAVEELEKLLKELEDLHRKSKEDSKDMLRRVEELHRRTKEKSKRILEEIERRITEEG

SEQ ID NO: 22322 - protein, 59 aa, Artificial Sequence
  Synthetic
DELMRKLEEILKRVAEAIKRLIDDDRRVLKRVAEEVKKLNEDDKRVADEVSERIKERLT

SEQ ID NO: 22323 - protein, 61 aa, Artificial Sequence
  Synthetic
DELEEAEERLREIDKRNEDLHEESRKESKRLLDELRKLVEDVKRELEKILEEAKDIVRKRG

SEQ ID NO: 22324 - protein, 59 aa, Artificial Sequence
  Synthetic
KEKLEKLRDVLRESERRNRELIEEDKEVMRRVSEEVKKLIDDLRRALEKAARDVEKIRR

SEQ ID NO: 22325 - protein, 61 aa, Artificial Sequence
  Synthetic
SELEDAERRAEEIDRRNKRTVERVEEELEKILREVEELHRRTEEKSKRILDEIRRKIRDRG

SEQ ID NO: 22326 - protein, 59 aa, Artificial Sequence
  Synthetic
KELADKLRDVLRRSAEENKKIIDRLRKILEDVARAVEELIKRDKRVMEEVKKEIDKLLT

SEQ ID NO: 22327 - protein, 58 aa, Artificial Sequence
  Synthetic
SEVEEIKKRARKLLEEVREIVDRVKKLHERLLREIEKTNREAKREHKRVLDTIRDIFR

SEQ ID NO: 22328 - protein, 58 aa, Artificial Sequence
  Synthetic
ETVADLDREIRRLKDELRRILEDLRRVSEEVKKELEKLTRDTRRVSKEVKDELKKVEK

SEQ ID NO: 22329 - protein, 60 aa, Artificial Sequence
  Synthetic
REVDEIKKRLTEMLETVRKIVEEIRRELEKLLEDVREINERVKEEHERILKDIRDVARKI

SEQ ID NO: 22330 - protein, 58 aa, Artificial Sequence
  Synthetic
ETMEDLKRRVREVEKRLEEILRRLDDVVRKIKEELKKLTDDTRRVSKRVKDDLERTRT

SEQ ID NO: 22331 - protein, 58 aa, Artificial Sequence
  Synthetic
SRVEEIKKELRRLLEEVRKKNEESKERDRRLNDTIRRELEEIIRRLRKLLEEIRRLRE

SEQ ID NO: 22332 - protein, 58 aa, Artificial Sequence
  Synthetic
RTVEDLRRVVEKVLRDIKRSIDDVRRENKKSNEDARRWLEELKREVKRLKDELREIEK

SEQ ID NO: 22333 - protein, 59 aa, Artificial Sequence
  Synthetic
SEVERIKRELERLLKEVKDANKRVKDTLRKLLRDVEEMNRRVKRENHELLRRLDELVKA

SEQ ID NO: 22334 - protein, 59 aa, Artificial Sequence
  Synthetic
EELLKDVRKVAKEVEEELKKLHDDTKRVADKVKEDLDRLHRDSERNARRSEEEMDKRRK

SEQ ID NO: 22335 - protein, 59 aa, Artificial Sequence
  Synthetic
DRVREVKERLKKLLEEVERTNREVMERNHRLLEDVERKNRRVKEENHRLLEELKRLRED

SEQ ID NO: 22336 - protein, 59 aa, Artificial Sequence
  Synthetic
ERLLEDVERTAERVERELDRLHEETKRNADRSREELEKLHRDSEKNARDSAKELEKIRR

SEQ ID NO: 22337 - protein, 59 aa, Artificial Sequence
  Synthetic
DEVERAEEELERLLRELKKLHEDAKERARELLKRIEDVNRKVKEELKRLLDTIRKLREA

SEQ ID NO: 22338 - protein, 59 aa, Artificial Sequence
  Synthetic
KDLLEKVKRVVEEVHKRSRELNEDTRRVIDKVEKDLDELHRDSRRVVETVKEELEKLRK

SEQ ID NO: 22339 - protein, 59 aa, Artificial Sequence
  Synthetic
KEVEEVKRRLREVLKRLKEMHERVKRELEKLLKKVEDFNRDVKRKNHDLLRRLEELKKA

SEQ ID NO: 22340 - protein, 59 aa, Artificial Sequence
  Synthetic
KDLLEDVEREARRLHDESRKLNEDTKRVVDTVTEELKKLHRDSERNAKRSEEEMDKRRK

SEQ ID NO: 22341 - protein, 59 aa, Artificial Sequence
  Synthetic
DEVERVKETLDKLLDDVRKLNEEVKKRLEELLEKVERDNRKVKEDNHRLLEEVKDLKRR

SEQ ID NO: 22342 - protein, 59 aa, Artificial Sequence
  Synthetic
KDLLEDVERRAKRVEEELDKLHEDTRREADRVRRDLRRLDEDTKRNVDESRKELEKTRK

SEQ ID NO: 22343 - protein, 60 aa, Artificial Sequence
  Synthetic
SEVEEVIRRIRALVEEIARKNEDILRKNRKLLEDLRELVERVIKEIKELIDRLADEVRRV

SEQ ID NO: 22344 - protein, 59 aa, Artificial Sequence
  Synthetic
DRVRKEVEEVLRDVEERIRRLDEEVRRRAEESERELERLREKVEDMIEKVKRALEELRR

SEQ ID NO: 22345 - protein, 60 aa, Artificial Sequence
  Synthetic
SELEEIIKKLRKLVEDVARRNEELIKKLEETNKRLEDEVRELIEEIKKLIDELAETVKRI

SEQ ID NO: 22346 - protein, 59 aa, Artificial Sequence
  Synthetic
EEMKKRLRDVAEKLKEDVRDLDRKVKKVAKESHERNRRILKELEEVAARVTERLEELRR

SEQ ID NO: 22347 - protein, 55 aa, Artificial Sequence
  Synthetic
DEDERVDEVIKKVREDLRKLLEDSERVVKRSKEELDRWRKKVEDVMRDSDRRLEE

SEQ ID NO: 22348 - protein, 55 aa, Artificial Sequence
  Synthetic
EEVIKELKKLIDKLREDSKKTIEENKKMNKDAADEIEKIIEDNRRLIKRIEEEDR

SEQ ID NO: 22349 - protein, 55 aa, Artificial Sequence
  Synthetic
SEDERVEEVVKRIEDKLRRLLEESKRVVDDSKRRLDEWRKEVEKVVKKSTDDLEK

SEQ ID NO: 22350 - protein, 55 aa, Artificial Sequence
  Synthetic
EEVIKELEELIERLARISKKTIEEDRRVNKELAERIKEIIERNRRVIEEARERLR

SEQ ID NO: 22351 - protein, 59 aa, Artificial Sequence
  Synthetic
KELEELIEELERLNREINERAKELIKKLRKLNEEVARRHERLIEELRRILEELKELLER

SEQ ID NO: 22352 - protein, 59 aa, Artificial Sequence
  Synthetic
EELRRRAKRVLEESKRNIEKVAEDVTRVLRESEESLERLRERSERVLREVEKTIRDMAR

SEQ ID NO: 22353 - protein, 59 aa, Artificial Sequence
  Synthetic
SEVERLIEELDELNRRINEKHKKLRRELEELNKRVAERHEELIRRLRKLLEDLERLARR

SEQ ID NO: 22354 - protein, 59 aa, Artificial Sequence
  Synthetic
EELRKRVEDALRRSKENIKRLEEESREVLRRSEKSIDELRRESERVLKEVKEEIERVRK

SEQ ID NO: 22355 - protein, 59 aa, Artificial Sequence
  Synthetic
SELEELIKELRDLNRRINKRVDDLADELRRLNERINRRHEELIKELRRLLEDLKRKFDR

SEQ ID NO: 22356 - protein, 59 aa, Artificial Sequence
  Synthetic
EELKKRADDVLRESKENIERVERKIRRVLEESEENIEDLRRRSKEVLDEVRKRIEDIRR

SEQ ID NO: 22357 - protein, 59 aa, Artificial Sequence
  Synthetic
SELEELIRRLKELNKDVNEKHKRLIEELEKLNRDINERHKELIEELERLLRRLEKLLRD

SEQ ID NO: 22358 - protein, 59 aa, Artificial Sequence
  Synthetic
EDLRREAERVLRESEENIKELEDRSRDALRRSEENIRRLKKESEDVLREARREVERLER

SEQ ID NO: 22359 - protein, 59 aa, Artificial Sequence
  Synthetic
SLEEELDKVLKESRDNVRRVEEELEEVMEKSERAAEKLRRDLDRVLEELEKMIRDLKRR

SEQ ID NO: 22360 - protein, 59 aa, Artificial Sequence
  Synthetic
REDIKRVIDTLRKLNERLNREVKEVIKRNEELVRRLAERVKKVVEDLRRLVKRLDDEVR

SEQ ID NO: 22361 - protein, 60 aa, Artificial Sequence
  Synthetic
SLEETLKEVLRKSEENAERLKRELEKVLRKLEEDLRRLDERLDEVLKRSRDEARKLREAD

SEQ ID NO: 22362 - protein, 59 aa, Artificial Sequence
  Synthetic
REVIKRVIEDLDRLNDELNKEVEEVIRRLEDIVRELEKKIREVIKRNKELVDRLEEKVR

SEQ ID NO: 22363 - protein, 59 aa, Artificial Sequence
  Synthetic
DLEKRLRDVLKESDENIEELRRELREVLKESEDNVKKLAEENKEVTDRLREEIKRLKEE

SEQ ID NO: 22364 - protein, 59 aa, Artificial Sequence
  Synthetic
KEEIERVIRELKDLNRRLNEELKRAIKRIKELNKRLNELSKRSIDELRRLVEELERRVK

SEQ ID NO: 22365 - protein, 61 aa, Artificial Sequence
  Synthetic
SLKEKLEEVLRRSEENVERLRKENEDVAKKNREAIEEIKKRLDDVLRELRERIERLKKEGV

SEQ ID NO: 22366 - protein, 59 aa, Artificial Sequence
  Synthetic
EEVIDRAVEELKKLNDDLNRTVKKVIRESEELTETLRKDVKRVVDDLRRLVEELARRVK

SEQ ID NO: 22367 - protein, 59 aa, Artificial Sequence
  Synthetic
DLEEELKEVLKESEENIERLKRENDRVVEKNKKAVDDLRERNKRVTERLREEIERLKRR

SEQ ID NO: 22368 - protein, 59 aa, Artificial Sequence
  Synthetic
KKDIKRVIDELRKLNEDLNRRVKEAIKTSEKITDDLRRMSEESEKELRELVRRLEERVR

SEQ ID NO: 22369 - protein, 60 aa, Artificial Sequence
  Synthetic
SEVEEIIRRIDELIKRLAETVKEIVDRLRKLNKKLNDENREIIKEIRDLIRELAKEVKRI

SEQ ID NO: 22370 - protein, 59 aa, Artificial Sequence
  Synthetic
EEVRERLERVLRRVEEVIKRLKEELKKVLDESRKNVEDVTRENEKVLDEVRKTIDELRR

SEQ ID NO: 22371 - protein, 60 aa, Artificial Sequence
  Synthetic
SEVEELIKTIERLIKELEKLNEEIIKRLRDLNKRLNERNEEIERTLRKLITDLARMVREV

SEQ ID NO: 22372 - protein, 59 aa, Artificial Sequence
  Synthetic
EEVLRRLEEVLDRVKKKIKTLTDKNREVLERSRENVKKVTEDNERVLRKLKEDIERLRK

SEQ ID NO: 22373 - protein, 60 aa, Artificial Sequence
  Synthetic
SELEEALKDIKRLIDKLRKDNEDIIRRLRETNDELRKLNKKIIDEIRDLIRRLEEVAKRI

SEQ ID NO: 22374 - protein, 59 aa, Artificial Sequence
  Synthetic
KDLKKRLEDVVKRVREEIEKLTRDNERVLEESRRTLEKLTRENEKVLREVKKKIDDLRK

SEQ ID NO: 22375 - protein, 60 aa, Artificial Sequence
  Synthetic
SELEDVEEKIKRLIDRLRELNKKIEDDLRKLAKELADLNKKIIREIEELIRRLAEVVKRI

SEQ ID NO: 22376 - protein, 59 aa, Artificial Sequence
  Synthetic
EELKRRLRKVLERVKREVEKSSERNREVVERLRKELERLTRENEEVLKRVKKEIERLEK

SEQ ID NO: 22377 - protein, 60 aa, Artificial Sequence
  Synthetic
SEVDEVIKRLDELIEELRKRNDDIIREIEKLIKRLEEENKEIVDRIRELIKRLEDMVRRL

SEQ ID NO: 22378 - protein, 59 aa, Artificial Sequence
  Synthetic
KDVLDRLREVLDRLRKEIERLTRKNEEVLKDVRRRVKRSSEENEKVLKEVRERIERLKK

SEQ ID NO: 22379 - protein, 60 aa, Artificial Sequence
  Synthetic
SDVDEVIKRLRELIRENHKRNKKIVDEIRELIRELKERNKKIVDEIRELIKRLKDIVRRL

SEQ ID NO: 22380 - protein, 59 aa, Artificial Sequence
  Synthetic
EEVLRRVEEVLRELREAIKRDDEENKKVLEEARKTVEDSSRENKRVLEEVRRRLDEERR

SEQ ID NO: 22381 - protein, 59 aa, Artificial Sequence
  Synthetic
SEKERAEEVFRESKKNIDDVKRKLERVLEDSKRTLDELRKEVEKVLKESEDELRKLARS

SEQ ID NO: 22382 - protein, 55 aa, Artificial Sequence
  Synthetic
EELIREIRELNKRLNDTIEDVIRRMKDLNRRLAEVIKEIIERNKKLIEDAARRIK

SEQ ID NO: 22383 - protein, 59 aa, Artificial Sequence
  Synthetic
REKERLKEVVEKSRRNLEKLREDSERVLEKSRRTLERLKKEVEEVLKESEERLRELARS

SEQ ID NO: 22384 - protein, 55 aa, Artificial Sequence
  Synthetic
EELIKTIEDINRRANEESKRTEKELEDINRKLEEDIKRIIDRNRKMIEDAARKIK

SEQ ID NO: 22385 - protein, 59 aa, Artificial Sequence
  Synthetic
REEERLEEVLRRAEEILKRLEDEVRKVVEDSKKNIEDVRREVEEVLKKSEDRLRKLARD

SEQ ID NO: 22386 - protein, 55 aa, Artificial Sequence
  Synthetic
EELEKRLKEILDRAAEEIRRIIRELEELNKEANDRIRKIIKENEDLIREAEERTR

SEQ ID NO: 22387 - protein, 59 aa, Artificial Sequence
  Synthetic
ELEERIKKANEDSKRTLRELMERVRKANEDSKRKLEEIREKVERANRESKKILDELRKA

SEQ ID NO: 22388 - protein, 59 aa, Artificial Sequence
  Synthetic
EKVIRELIKELKDVNRALEKKAKELIDELEEVDKDLEDKVRELIRKLKEVNEDLKRKAD

SEQ ID NO: 22389 - protein, 59 aa, Artificial Sequence
  Synthetic
SLKERVKKVLEESERNLEENKKDAKRVNDETRKKLKELEDRADRVNRETERALRELEDN

SEQ ID NO: 22390 - protein, 59 aa, Artificial Sequence
  Synthetic
EKVVREVIEELKRVNDKLNDASRRLNERLKRVVEDVERRVRDLNKELEDVVEELKERTR

SEQ ID NO: 22391 - protein, 59 aa, Artificial Sequence
  Synthetic
ELEERIKRVIDELRRRLEELRRELKRVNDKTEEDLRRLEDNARRVNDTSRKMLERLEDG

SEQ ID NO: 22392 - protein, 59 aa, Artificial Sequence
  Synthetic
ETVVREIIRELEKVIEELEREVRELNRELREVVERVAKKVRDLNRELEEVIRDVKRKVD

SEQ ID NO: 22393 - protein, 59 aa, Artificial Sequence
  Synthetic
SLEDEARELRRKSEKTNDELRRAIEELEKKVRDMIRRSEEHVRDLVRKVKRVIEKLEED

SEQ ID NO: 22394 - protein, 59 aa, Artificial Sequence
  Synthetic
RKDLEELIKELKKLNDESREEIERLIRELEELLKEIEDRNRKLAETLKRLLEEVEKRAR

SEQ ID NO: 22395 - protein, 60 aa, Artificial Sequence
  Synthetic
SIEEEIKELKDRSKKTNEELKKEIDELKEDSERTNRESRKHVKEVLDRLREILERLRREG

SEQ ID NO: 22396 - protein, 59 aa, Artificial Sequence
  Synthetic
RKEIKRLIDELTELNKRSKELIKRLIEELKKLNDDSRKENKRLVREVERLAEEVDRRVK

SEQ ID NO: 22397 - protein, 59 aa, Artificial Sequence
  Synthetic
SLEEKAKRLKEESDKTNKKLRELIERLERESRRTNEELRKKIRELLEDARRELDRLRKE

SEQ ID NO: 22398 - protein, 59 aa, Artificial Sequence
  Synthetic
EKKVEELRRDLERLDRESEKKIRDLIKTLDELNKESDRKIRKLEEELKRLLEEVEKRVR

SEQ ID NO: 22399 - protein, 59 aa, Artificial Sequence
  Synthetic
DIEKKIEDLRRKAKKVIDDLRKRSDELKKRSKDTNDRLREELKKLEEDVRRVIEDLRRR

SEQ ID NO: 22400 - protein, 59 aa, Artificial Sequence
  Synthetic
DKDIEKLIRDLEKLLRDVEERHEDLRRKAEELDRDTKEKVDRLIKELKDLLKEVRDRVR

SEQ ID NO: 22401 - protein, 60 aa, Artificial Sequence
  Synthetic
SLKEKLDDLVRKSDDTNKDLEEKARRLVEDAKRVLKELEDKSRRLVEEARKVLKRLEEEG

SEQ ID NO: 22402 - protein, 59 aa, Artificial Sequence
  Synthetic
DKKIKELIEELEDLDRRSKKAVEDLIKELKKLIDEVREIHDRLEEELRRLIKTVRDKAR

SEQ ID NO: 22403 - protein, 59 aa, Artificial Sequence
  Synthetic
SLEDKVRKLEEEIKKVLKEIREEVERLLEEDRRTLEDLKRRHRESDRESKEVLDEIAKK

SEQ ID NO: 22404 - protein, 59 aa, Artificial Sequence
  Synthetic
DKVIKEVIDTLRKRLEELKRRLEDVIREVRKANEDSERESRDVIRKLKELLERLKEKVK

SEQ ID NO: 22405 - protein, 60 aa, Artificial Sequence
  Synthetic
SEEEKLKEVKDRIREVLRKLEEHTDKVKKEVEKVLRDIRRTTDELKKEVRAMLERLRRKK

SEQ ID NO: 22406 - protein, 55 aa, Artificial Sequence
  Synthetic
DELVTEVEKLLRDDEETNRDVVKKVREAVKKDADTNRKVIEEVKKVLEDAARRLD

SEQ ID NO: 22407 - protein, 60 aa, Artificial Sequence
  Synthetic
SEEEKLERVERRLEKVLDEIRRHTEDVKRKDEENLDRLRKKIEKLKRELEKVLRDLEEKR

SEQ ID NO: 22408 - protein, 55 aa, Artificial Sequence
  Synthetic
DELVKKLEELLEEDKDTNRKVVKEIEDANRRVNEELDRVIEELKRILEELERRLR

SEQ ID NO: 22409 - protein, 59 aa, Artificial Sequence
  Synthetic
SEVDEVRKTLEDLLRRLDEENKDIIRRNKELLDDLDRKVREAIERLKRLLDELRKILEK

SEQ ID NO: 22410 - protein, 59 aa, Artificial Sequence
  Synthetic
EELARRITELEKRVREVIERLKEKNKRLEDDSRRVITELRKKLKDLEDRVREEIEELRK

SEQ ID NO: 22411 - protein, 58 aa, Artificial Sequence
  Synthetic
SEVERVKEELKRLLEDLDRKNKRMIDEDERLNKELNEENERLIRELEELLKRLKEIRD

SEQ ID NO: 22412 - protein, 59 aa, Artificial Sequence
  Synthetic
EEVKREIDKLREEIREVIERLDKKNEDVLRKSEKNVRDLNRENEEVLRRATEAVRELER

SEQ ID NO: 22413 - protein, 59 aa, Artificial Sequence
  Synthetic
DEVDKVTRTLEELLKRLEEENRKMIEDDKRLNEELNKENRRVEETLRKLLKELEDIRKD

SEQ ID NO: 22414 - protein, 59 aa, Artificial Sequence
  Synthetic
KEVKEKIDRLEKRIRDAIRELNERNKKALDDSERNVRELNKRNERLREEVERKIRELER

SEQ ID NO: 22415 - protein, 59 aa, Artificial Sequence
  Synthetic
SEVDEVAKRLRDLLRELEEKLKRAEDRDRKLNDDLNKTNKKLIKELEDLLRKLEEIARR

SEQ ID NO: 22416 - protein, 59 aa, Artificial Sequence
  Synthetic
DEVRRKIDELEREIKEVVDRLRRRLEELLRRSKENVDRLNRENDRVLEEAKRKIRELEK

SEQ ID NO: 22417 - protein, 59 aa, Artificial Sequence
  Synthetic
SEVDEVADRLEKRLKENRDKNKRVEDEDKRLNKELNDTNRRMEEELKRLLTEIDDIRRK

SEQ ID NO: 22418 - protein, 59 aa, Artificial Sequence
  Synthetic
EEVRKKIDELERRLKEVIDDSKRRNDELERESRENVRELNRRNKELEDEARKEVERAKK

SEQ ID NO: 22419 - protein, 59 aa, Artificial Sequence
  Synthetic
SRVDEVIERLERLLRELDKINRDMIEDDKRLNTELNKENKEVEDRLRRLLEELEEIRKK

SEQ ID NO: 22420 - protein, 59 aa, Artificial Sequence
  Synthetic
KEALDKIRRLEERARRVIEELDEKNRRALERSKENVKRLDERNERLRKELEEKVRRLRK

SEQ ID NO: 22421 - protein, 58 aa, Artificial Sequence
  Synthetic
DVEEKVKKVIRELREVLKEIEERVRRVLERNKRSLEDLKRKHKESIDRAKEVLDEIRK

SEQ ID NO: 22422 - protein, 59 aa, Artificial Sequence
  Synthetic
EEALKRLEDKLREKLRDLRRKLDELRKENEKVNRDLEDKTRRVIEKLKRVITKLKEEVK

SEQ ID NO: 22423 - protein, 60 aa, Artificial Sequence
  Synthetic
SEIEEVEKRLEDVLRKVNKKTEDLMRSVKEIIKRSREHLEKVIRDLEEILKELRELRKRG

SEQ ID NO: 22424 - protein, 59 aa, Artificial Sequence
  Synthetic
EDVKRRIEEVEERLKRDNERNNKKIEDVNRDNRRVAEELRRRVEDVKRKIEKVLRELKK

SEQ ID NO: 22425 - protein, 59 aa, Artificial Sequence
  Synthetic
DVEELLDRVTKRVEKALRELRKKVRELKEENRKSVEELEETSKRLKKEVDDVERRLEAG

SEQ ID NO: 22426 - protein, 59 aa, Artificial Sequence
  Synthetic
REKLKKVLEEIEKILKEIEDKVRRVIEKSRRINEENKETNRRVIEDVRRLLKKAEEDLR

SEQ ID NO: 22427 - protein, 60 aa, Artificial Sequence
  Synthetic
RVEERLDEVRKKIDEVLKRLRDTTKELEDENEESLRKLKKEVDEVRKKIEEVLKRLEDAN

SEQ ID NO: 22428 - protein, 59 aa, Artificial Sequence
  Synthetic
EEKLEKVDREIEEILRRNKRTNEKVAEESRKINREAEERLRRVIEELEKILKEIEDRLK

SEQ ID NO: 22429 - protein, 60 aa, Artificial Sequence
  Synthetic
SVEKKLKDVEDEIRKVLRELEETSKKLDKEVDDMLKKLKDSTEEVKKEIDEMLKRLEERR

SEQ ID NO: 22430 - protein, 59 aa, Artificial Sequence
  Synthetic
DEKLDKVVKDLRKLLEDDKRTNKEVIDRVRRKLEENKETNEKVIKELRDILREIEERAR

SEQ ID NO: 22431 - protein, 60 aa, Artificial Sequence
  Synthetic
SEIEDVARRIRKLLEELRRRIRKIAEDSRRLNRRLEERNTEMEKEIKDRLRKLEEELKRK

SEQ ID NO: 22432 - protein, 59 aa, Artificial Sequence
  Synthetic
EEVKEKIDRLEKEIRDMLKELRERIKRLKDENEKSLEDLRRRNTELEEEVRRVIRELEK

SEQ ID NO: 22433 - protein, 60 aa, Artificial Sequence
  Synthetic
SELEKVAEDIRRLLKRNEEINREMIKRSRELNEELRERNREVTERIRRLLERLKEERKRT

SEQ ID NO: 22434 - protein, 59 aa, Artificial Sequence
  Synthetic
DELEKKLRDLEREIRKVLREAKRLNDELRKENKESLERLKRENDKLRKEVETVIREAEK

SEQ ID NO: 22435 - protein, 60 aa, Artificial Sequence
  Synthetic
DEIEEVIRRIKRLLDENRKKNEEMSDRSRKLNERLRKIIKKIIDEITELLKRLEDRARTV

SEQ ID NO: 22436 - protein, 59 aa, Artificial Sequence
  Synthetic
RKVDKKIEDLRKEIEDVLKELAERNKENKDRNKKSADELRKEIEDLERKVREVIRELTR

SEQ ID NO: 22437 - protein, 60 aa, Artificial Sequence
  Synthetic
RVEDEIRRLEEEARRVLRELEDLLRRLKKKNDESNKEIRERIERVRRKAEKVLRELERRG

SEQ ID NO: 22438 - protein, 59 aa, Artificial Sequence
  Synthetic
ERVIERLIRELRRLLEDVKRKAEDLIRKSEDLNEKWRKELKKLEREIERLLKEVADRVK

SEQ ID NO: 22439 - protein, 60 aa, Artificial Sequence
  Synthetic
EAEKELKRVEDRDKESNDRTKDILRRIEKEVRESNKRSKEILDEIRKRVRDVIEELRRKR

SEQ ID NO: 22440 - protein, 59 aa, Artificial Sequence
  Synthetic
EETVRRLKDELEEVNERTERAVRDLLRKARKVDDESRRRVEALLRKVEEVLREIKRRVD

SEQ ID NO: 22441 - protein, 60 aa, Artificial Sequence
  Synthetic
SFKETLDEIRKRVKEVLDKLEKILRDIARRVEKVNKENEDRLREINRRNEEVLRRLKKKG

SEQ ID NO: 22442 - protein, 59 aa, Artificial Sequence
  Synthetic
EDKLRELLERLERLLRELERRVEKIEEDLKRILDEVRKRTKELLERNERILEKLERDAD

SEQ ID NO: 22443 - protein, 60 aa, Artificial Sequence
  Synthetic
SIEDIVREIRERNKDAKRKVEDIVRRNREEIDKVLKRVEKILRDNEKRIREVKEELKERV

SEQ ID NO: 22444 - protein, 59 aa, Artificial Sequence
  Synthetic
EKDLDKVRKESEDNLREILRTLKEVHERSKETLKRIEDTLRRVHKKSEDELRRLREEVR

SEQ ID NO: 22445 - protein, 60 aa, Artificial Sequence
  Synthetic
SIEEIAKTIKEEIKEVMDRVREIVERDEREIKKVKEEVDRIAKRNEDEIRKVKDELDKKV

SEQ ID NO: 22446 - protein, 59 aa, Artificial Sequence
  Synthetic
EEAMKEVADRVRKKLEEIERTLEEVHRKSRKVLTEIIKKLKENHDRSKELLDRIREEVK

SEQ ID NO: 22447 - protein, 59 aa, Artificial Sequence
  Synthetic
SEVEEVLKEIKDLLRRLEEIVRRVLKENRRLLEEDVRRTEEILEELERLLDELRKDIKR

SEQ ID NO: 22448 - protein, 56 aa, Artificial Sequence
  Synthetic
EELLKRIEDEVRRVEDKLRKLIKRSKEESDKVAEELERLNREARKRIRDVMEELKR

SEQ ID NO: 22449 - protein, 60 aa, Artificial Sequence
  Synthetic
DEAEEILRRLKKLLEDAKRISDRTVEKNREMLKKIEEDSKRSLERNRELLKRIKELAKDI

SEQ ID NO: 22450 - protein, 56 aa, Artificial Sequence
  Synthetic
REIIERLKEEVDRLLKELRDSNRELKRESDEVVEKLRELNKRSKEEADKVEKDLRR

SEQ ID NO: 22451 - protein, 60 aa, Artificial Sequence
  Synthetic
SEVDEVLKRLRKDLDKVRKDSKKSLEELRRVLEEVERLSDESVKRLEEVLKRLEDLIKDI

SEQ ID NO: 22452 - protein, 56 aa, Artificial Sequence
  Synthetic
REIIKKLADEVREVLERLKELNRRLEKEARDAKRRLEESNDRLRRKVEEVIKELRR

SEQ ID NO: 22453 - protein, 60 aa, Artificial Sequence
  Synthetic
SEVEKLLDESRRVVEENRRANKKLAEESRKAVRRNREESKRLNEELREVVERARRKVTER

SEQ ID NO: 22454 - protein, 56 aa, Artificial Sequence
  Synthetic
EESLRRIKRTHEETEKESEKTLRDLEDEHRKTIEELERSLKELRDRIKKVLDELRK

SEQ ID NO: 22455 - protein, 56 aa, Artificial Sequence
  Synthetic
DEVEEVLKKARKDIERWREETRKVKEENKRNIDRIRKKLEEVLRDLKRAIDEIRKS

SEQ ID NO: 22456 - protein, 55 aa, Artificial Sequence
  Synthetic
REVLEEIRKLLRDIKETDRKVHEELERSNEKLRREIEKILRDLEDELRKLRRERE

SEQ ID NO: 22457 - protein, 57 aa, Artificial Sequence
  Synthetic
SEVEEVLRRAEKAIREWEEETRRAKEENEKNIKKVADDLRRLLEDARRTIEEIEKRR

SEQ ID NO: 22458 - protein, 55 aa, Artificial Sequence
  Synthetic
EEVLKEIKKLIDTARRKDEKVHKELEDTNRDLDRAIEEVIREIKKLLDDLREKAR

SEQ ID NO: 22459 - protein, 60 aa, Artificial Sequence
  Synthetic
SEKEDVLRRIKELLERLHEENREVLTRIEKLLKDNKERNDDVLRRITELLKEVTKRAKDR

SEQ ID NO: 22460 - protein, 56 aa, Artificial Sequence
  Synthetic
TEEVRKRVEDVVRKNKEVARELLDRVRKLSERNKRAIDKLLEEVKRVLEEVERALK

SEQ ID NO: 22461 - protein, 57 aa, Artificial Sequence
  Synthetic
DEERDVRREIRKLLRDAEEHSKKLNEESKKTNKRNEEENRKALEDNKRLLKEVEDRI

SEQ ID NO: 22462 - protein, 56 aa, Artificial Sequence
  Synthetic
VTELRERIKRLIEEIERLNREFKKKNEELSKKNKELVERSRTESKKLVDEARERAR

SEQ ID NO: 22463 - protein, 60 aa, Artificial Sequence
  Synthetic
DSEEEVRKRVKDLSEENKRLVKTAEKRVRELSKENKELVERLKREVDRIKKEIEELKRRG

SEQ ID NO: 22464 - protein, 55 aa, Artificial Sequence
  Synthetic
EKVLREIREIVKKNKRENEEVLRRIRELVKENNDENKRVLDEIEKLLKEIEDESR

SEQ ID NO: 22465 - protein, 61 aa, Artificial Sequence
  Synthetic
SEMDEVRKKLRELVERLKKEAERSRKSHREILKKVRDDLKRSEESHKELLDRLEEVLKRTV

SEQ ID NO: 22466 - protein, 59 aa, Artificial Sequence
  Synthetic
EDKLRRLLEEAAEVIKRLLDEVKRLNEHAKRMAEKILEDVKRLNKHAEDKVRDVEEKVK

SEQ ID NO: 22467 - protein, 61 aa, Artificial Sequence
  Synthetic
RELEEVARRLERLLDELRKKLRESERSVRRLLEELKKELEKLRKRHEDLLRTVKKKLDDTV

SEQ ID NO: 22468 - protein, 59 aa, Artificial Sequence
  Synthetic
EEELKRLLEEVEKAIRELLERVERLNRRLEEEIRRVLEDLERIIRHAEEDLRRIEEEVK

SEQ ID NO: 22469 - protein, 61 aa, Artificial Sequence
  Synthetic
RELEEVKKKLEKLAKDLRDTLERSARSVEELIKRLEDELRRSEESHKELLERLEDTLRKRA

SEQ ID NO: 22470 - protein, 59 aa, Artificial Sequence
  Synthetic
EEELRKLLKDATEEVRRIAEEVKKLNDELRRAVEEVLKEVRETNKHVREMIETVREEVE

SEQ ID NO: 22471 - protein, 61 aa, Artificial Sequence
  Synthetic
SELEEVAKRLKELVDDVRRALKESDDSHKELLKRLKEKLDEVRKRLKKLVDDLEETLKRTL

SEQ ID NO: 22472 - protein, 59 aa, Artificial Sequence
  Synthetic
EEELERLVREVERVIRKLKEDVKRLNDHAREKVKRVEEELRREEKRVRDEVERVKEEVR

SEQ ID NO: 22473 - protein, 61 aa, Artificial Sequence
  Synthetic
SELERVEDEARKLADDLRRMLEESRRSHEKILREVEEELKKSEESVRRILERVKEVLDRKL

SEQ ID NO: 22474 - protein, 59 aa, Artificial Sequence
  Synthetic
EDELRELLDRLRKAIKKLLDDVKRLNDHVKELIERIRDEVRRLNRRLEEEARDVERRVE

SEQ ID NO: 22475 - protein, 61 aa, Artificial Sequence
  Synthetic
DELETVREEIERLARELEKELKKSEDSVEKLLRELKERLKEVRKRHKELLDRLRDRLRKTV

SEQ ID NO: 22476 - protein, 59 aa, Artificial Sequence
  Synthetic
EEELRRLVEDVKRVVDEVLERVKELNKRLEEAIRRILEELKKIEKNVKDFIEDIDRRVK

SEQ ID NO: 22477 - protein, 61 aa, Artificial Sequence
  Synthetic
RELEEVKRRLEELLERLRKELERSDKSHKELAKKLRDELERVEREHERLLRELEDTLRKTL

SEQ ID NO: 22478 - protein, 59 aa, Artificial Sequence
  Synthetic
EKELTDLLREAKRRVEEVLKEVRDLNRNVKETVDRVLKELEDILRNVEEMIKEIKDKVR

SEQ ID NO: 22479 - protein, 56 aa, Artificial Sequence
  Synthetic
SDAEDILRKVEDLIRRLAEKHRDLLRRSKENAERIKREHDDHHRDIRRVIKEIEDN

SEQ ID NO: 22480 - protein, 55 aa, Artificial Sequence
  Synthetic
RELLKTVRDLLETLREINDRVREELRKIHEDVERRNKEVLDRNKKLLEELERKRR

SEQ ID NO: 22481 - protein, 58 aa, Artificial Sequence
  Synthetic
SELEDIERKLKELEDEDRELNRKLNDDTRRLDERNRRLNEELTKKLREVEEEAKELRK

SEQ ID NO: 22482 - protein, 55 aa, Artificial Sequence
  Synthetic
ERVREKIERIAKKLEDDNKESEDRHRRINEENRRRNDKNREDIERILRRLDEELR

SEQ ID NO: 22483 - protein, 58 aa, Artificial Sequence
  Synthetic
KELEEVDDEVRKEAEEVKRYIKESKEKLDRLRREDERLNDRVREKVEDVRRRVEERRS

SEQ ID NO: 22484 - protein, 55 aa, Artificial Sequence
  Synthetic
ERVKRKVDKIERELEDAIRRANEEHTKIEEDLRRRNKESKDEIRRILEELEERTR

SEQ ID NO: 22485 - protein, 60 aa, Artificial Sequence
  Synthetic
REIETVRREIEKILDDLRRTVKRIEDEVRKIHEDLRRSLEDSKRNIEEILKDLERAARRD

SEQ ID NO: 22486 - protein, 59 aa, Artificial Sequence
  Synthetic
KKDIDKLLKELRDLVEKIKKDLKELLERYEEIVRRIKELLKDLNREAEEVVRRLKEELR

SEQ ID NO: 22487 - protein, 60 aa, Artificial Sequence
  Synthetic
DEEERAEREIKKLLDDLRRTLEEVKEAIRRILEDNRRTTKRINDEDRKINDDLRRTLERR

SEQ ID NO: 22488 - protein, 56 aa, Artificial Sequence
  Synthetic
VDKVLKEVEETIDRVKKDIRRALREVEETSKEDKKRLREVLERSKDLARRLKEKLK

SEQ ID NO: 22489 - protein, 60 aa, Artificial Sequence
  Synthetic
SREEEAERRIEKLLRELEKTNRDIHEEIRKILERLRRTLKKVNDEDEKLNRDLEDTLRRR

SEQ ID NO: 22490 - protein, 56 aa, Artificial Sequence
  Synthetic
VEDVLRRVKEIIDRVKEEHKRMLEEVRKIAKDLEEKIRAVLEESKKLAEDIKRRLT

SEQ ID NO: 22491 - protein, 60 aa, Artificial Sequence
  Synthetic
REEEKAEEDIRRILRDLKETNRRIHEEIKKLLDDNERTLRRINEEDKKLNEDLRRTLEES

SEQ ID NO: 22492 - protein, 56 aa, Artificial Sequence
  Synthetic
VEEVLKTVEDIVRKVKREHEELLKEIEDLSRENKKDNERMLEESRRLARKLKEELR

SEQ ID NO: 22493 - protein, 60 aa, Artificial Sequence
  Synthetic
SEEEKMEEDIERLLDRLRRINKRLHDEHKKLNEDNERTVRRIDEEDKRINEDLERTLRES

SEQ ID NO: 22494 - protein, 56 aa, Artificial Sequence
  Synthetic
VRKVLEDVERIIRRLEEEHRRALEESRKRSEENKRENEEMLERSKELAERIKRRLK

SEQ ID NO: 22495 - protein, 60 aa, Artificial Sequence
  Synthetic
SEEEKAREDIKRLLEDLRRTNKKIHEDIEDILRELKETLKRVNDDDKRINDDLDRTLKER

SEQ ID NO: 22496 - protein, 56 aa, Artificial Sequence
  Synthetic
VEEVLRTVEKIIEDVKKEHEDLLKRVKDIVKKIKEEIEKVLRESEKLAREIKEELR

SEQ ID NO: 22497 - protein, 60 aa, Artificial Sequence
  Synthetic
SEEDELRKRVADILKRLREVNKRLHDEVKRLLKENRDALKEVKDKIRESNRELDEVLKRR

SEQ ID NO: 22498 - protein, 56 aa, Artificial Sequence
  Synthetic
VEEVLERLKEIVRKAEEEHKDVLRRLKEISDRHKRRLEEAERRNEKLLRDLKEELR

SEQ ID NO: 22499 - protein, 59 aa, Artificial Sequence
  Synthetic
SRLEEMLKRAEDLSRESEELLRRVLEEVKDLSRKHEEALREILKRVKDLVDTVRDLLRR

SEQ ID NO: 22500 - protein, 58 aa, Artificial Sequence
  Synthetic
EEVRKLEEELKRLLEENRRLAKELRDELRRLTKRNKDVVREVERRLEEIMKEIDKEVR

SEQ ID NO: 22501 - protein, 60 aa, Artificial Sequence
  Synthetic
SEDERIKKELRKVEREVDKLLKEHEKILEDLKREVDKLIETHRKILEELKRRVDELKRRG

SEQ ID NO: 22502 - protein, 55 aa, Artificial Sequence
  Synthetic
ERIRRELEEVLKDIRRKLKELKERNDKVNRDIEELLRELEERNTEVDKEIKKKAD

SEQ ID NO: 22503 - protein, 56 aa, Artificial Sequence
  Synthetic
DEEKEAEDLIEEHRRRSEEIARRADKLSEDHKRKVDEIAKTVEKLIRTLKEIVDRK

SEQ ID NO: 22504 - protein, 55 aa, Artificial Sequence
  Synthetic
KELKDRVERVLEESRELLERLRKKLEDNSKEVEDILRKLRKEVEDVVRKIRKRAE

SEQ ID NO: 22505 - protein, 56 aa, Artificial Sequence
  Synthetic
RDEDEVRKLITRHEKLSRDIAERLKRESKKHRDDVERIAKENEELNRRLREIVKKK

SEQ ID NO: 22506 - protein, 55 aa, Artificial Sequence
  Synthetic
KELKDDVRRVLKKSRDELKRLREELKRNSEEVERILKKLDEDNRRVLKEIRERLT

SEQ ID NO: 22507 - protein, 63 aa, Artificial Sequence
  Synthetic
DKEREVRRRVEELKKDSEDVLRRNREEVEKLHDENRKVNEESDRTAKELVEEAERMLREARKK

SEQ ID NO: 22508 - protein, 55 aa, Artificial Sequence
  Synthetic
EELLKELKKELDRLREENERSNRRLRKMLEELKRKNEEVNRELRKKLREIKERLR

SEQ ID NO: 22509 - protein, 57 aa, Artificial Sequence
  Synthetic
SEEERLERTVEEVEKALKKLADDLRRDMDRSRKSHEDLLDKLRKELDRVLEEIRKKT

SEQ ID NO: 22510 - protein, 55 aa, Artificial Sequence
  Synthetic
EEVEKRLRELLDEARREVERILKDLRELNEHVRRRVDEVRRRLEELLERLDRETR

SEQ ID NO: 22511 - protein, 56 aa, Artificial Sequence
  Synthetic
DEKREVEKELKRVDDEIKRLLRELEEALRRDKEEVDRLDKEVKDALDEVRERIERA

SEQ ID NO: 22512 - protein, 55 aa, Artificial Sequence
  Synthetic
EKVKEDLKRLLEEVEKAVRKVVEDSKRLHDEAKEAVDRNKEHLRRLLEDAKRRAK

SEQ ID NO: 22513 - protein, 56 aa, Artificial Sequence
  Synthetic
SEKERAEEEIERSKRNLERLLEEAKREIDRSRENLKRTLTKVEEVLRKIKEDLKRL

SEQ ID NO: 22514 - protein, 55 aa, Artificial Sequence
  Synthetic
EKLIRELRELNKRLAEEIKRLIDELRKLNKELDDEVEKIIRRAEDLLRDLERETR

SEQ ID NO: 22515 - protein, 57 aa, Artificial Sequence
  Synthetic
SEVEKVIRDLEEINKRLLEEIKRSIEENKRTNEEAERKVKEVIDRLRKLLEDLKRTN

SEQ ID NO: 22516 - protein, 59 aa, Artificial Sequence
  Synthetic
EDRLKRVEDVLRESVKNLKRLVDEVRKANRESNEHLKDLARKVEKVIREIEEEVDRTRT

SEQ ID NO: 22517 - protein, 59 aa, Artificial Sequence
  Synthetic
SELERLVEELRRALEKHKRRLEELKKELKKALDDHRREVKRLIDELKKTLDDVRKASRI

SEQ ID NO: 22518 - protein, 59 aa, Artificial Sequence
  Synthetic
ERLLEDVKRILDEVRREVEKLDTDADRRLREVKEEVERINREVEKTLRDVEEDLDRLKK

SEQ ID NO: 22519 - protein, 59 aa, Artificial Sequence
  Synthetic
SEVEKLKEDLKRALDEHRKRLEELKKELEDVLRRHEEKVRRLKEKLKRILDEIRRLSRI

SEQ ID NO: 22520 - protein, 59 aa, Artificial Sequence
  Synthetic
ERLLEDLDRALDEVRKEVEKLNRDAKRTLDKVREDVKRLDDDLRRTLKRVKEEIDKLTK

SEQ ID NO: 22521 - protein, 59 aa, Artificial Sequence
  Synthetic
DEIEELKKRLRKILEEHRKRVEDLKKENEDLNRRAEETLERLKRELEEMLREIAERSRI

SEQ ID NO: 22522 - protein, 59 aa, Artificial Sequence
  Synthetic
ERILEDLKRVIERVEREVRRLNKDLKRALDESRKRIEDWLKELDDVIKRVKREVEKIRT

SEQ ID NO: 22523 - protein, 59 aa, Artificial Sequence
  Synthetic
SEAEKLKKELEEVLERARRRLTELKEENKDANRRHRRRLEELKKRLEDVLKKVKDDADI

SEQ ID NO: 22524 - protein, 59 aa, Artificial Sequence
  Synthetic
ERILRRLEEVIRRVDRDIKELIKDAREVLERSKRDVERWNREMKKVLDEVRKRVEEIRT

SEQ ID NO: 22525 - protein, 56 aa, Artificial Sequence
  Synthetic
SEDEDAKRELRRVKEEVDKTLEDSKRVHDESRKRAREWLEDSKRVHREVKERLKEL

SEQ ID NO: 22526 - protein, 55 aa, Artificial Sequence
  Synthetic
EELKRELERVLEEHRRSLEKNKRDVERINEELKRRLDRNKEELRKILEDVERRRR

SEQ ID NO: 22527 - protein, 55 aa, Artificial Sequence
  Synthetic
SEEERLRREVKRVEDENRKLLERLREIAERVHRENKRLLDESRRIADKVRRDLDR

SEQ ID NO: 22528 - protein, 56 aa, Artificial Sequence
  Synthetic
LEEVLEELERVLKRLEEEHRRVVKELRDLLRRIKEDHDRLVEEAEEILREIDERAK

SEQ ID NO: 22529 - protein, 56 aa, Artificial Sequence
  Synthetic
SEEEEADKAIRTIAKAIEDLVRDLERALKESKRNIEELAKDLKRANDRIEEELEKA

SEQ ID NO: 22530 - protein, 55 aa, Artificial Sequence
  Synthetic
KELADRLRDLLRDAKRVVDRIKRALEELNKEAKKLVERAKKKHDDLLEDVKRDTK

SEQ ID NO: 22531 - protein, 56 aa, Artificial Sequence
  Synthetic
SEEEDAKRVLDEIREELKKLNDDVRRALKESKENIDRIIEDLDRTNKRIEEELDRL

SEQ ID NO: 22532 - protein, 55 aa, Artificial Sequence
  Synthetic
EELKERLKRLLERVREEVKRNKEHLERLNKKVKEDVDRLKKRHKDTLDEVDERRK

SEQ ID NO: 22533 - protein, 60 aa, Artificial Sequence
  Synthetic
KLDEDLEKVIKEVKERLKESLDRHKEVAKRLEEEVKRSEEEHRKVLEEAKRKLEEIKTKT

SEQ ID NO: 22534 - protein, 59 aa, Artificial Sequence
  Synthetic
DRTVRKVERELRDLIRRLEKRNEELIRRVKEIVERMEKTNRDLIRRIRELIKKVEDDVR

SEQ ID NO: 22535 - protein, 63 aa, Artificial Sequence
  Synthetic
SEEEKLKRVLDEFRRAVKELLEDLERANERAKDEVRRLLEDLDRAHERIRRAVEKLKERVKDK

SEQ ID NO: 22536 - protein, 55 aa, Artificial Sequence
  Synthetic
KDLEKRIRDTLREIKKRVEDVKRDNKRVLDELRKKIEENKKRNEDVLKEMEDKTE

SEQ ID NO: 22537 - protein, 60 aa, Artificial Sequence
  Synthetic
SDAERVKKESKDLLDTTKRLADRLKELLERLNKETRDRVREVIKEIERLVDEVEKEARKG

SEQ ID NO: 22538 - protein, 59 aa, Artificial Sequence
  Synthetic
EDIRTDLEDVLRRNKEALEEIRKDIERVNRKDREELREIARTLEKVLRDARRRLEELRR

SEQ ID NO: 22539 - protein, 59 aa, Artificial Sequence
  Synthetic
SIEDDLRRVLERSKRSLEELKRKADRVLEESKKNVRDLERELKRVLEKIKETIDKLRKD

SEQ ID NO: 22540 - protein, 59 aa, Artificial Sequence
  Synthetic
KEEVERLIRELDRVNEELAREVERLIRELEEVNRRVNEDLKRLIRELERALKELDERVR

SEQ ID NO: 22541 - protein, 57 aa, Artificial Sequence
  Synthetic
DEVDELIKRLEERNEELNRKAKRIIEKLKKENDDLNRKLDEIVRKAREDIEDAERRV

SEQ ID NO: 22542 - protein, 59 aa, Artificial Sequence
  Synthetic
KDLEDKLEEVLRRSKKNIEDVEKELRDVLRAAKKNLDDLRRKLEDVLRRLRDEIRRKKK

SEQ ID NO: 22543 - protein, 57 aa, Artificial Sequence
  Synthetic
SDVDRIITELRDINREVNRRVKRLIEELEELNRRLNEKAKRDMDEIRRLIEEAAKKL

SEQ ID NO: 22544 - protein, 59 aa, Artificial Sequence
  Synthetic
EDLKRKLEKVLKEARDNLEEVKKRLKEVLERSEENLRRLEEELRRVLEEVREMLKRKKD

SEQ ID NO: 22545 - protein, 57 aa, Artificial Sequence
  Synthetic
KDEEKIKRVLDDVERVLKENEDRNRELLKRVRERLEESRDHLRRVLEDVKRVLEELK

SEQ ID NO: 22546 - protein, 56 aa, Artificial Sequence
  Synthetic
VDELVKRIKDLLKRLNEISRRIAEEIKELLRTHDELNERVVRKLRDLLRKAREKRR

SEQ ID NO: 22547 - protein, 56 aa, Artificial Sequence
  Synthetic
SEEEKLKRVLEDVERDLRRNKRENEKSLEESKKVNDDNRRRNKEALDEVKKVLEDL

SEQ ID NO: 22548 - protein, 56 aa, Artificial Sequence
  Synthetic
DEELVDEIRKLLERLNEISERIHRRNKELDDELNEISKRIRERIEDLKRRAEERAR

SEQ ID NO: 22549 - protein, 60 aa, Artificial Sequence
  Synthetic
SEEDEIRRLLKENEDSTRRVEEDNKRLNDENEKSTKRVEDDIRRILERVRRELDDLRRRG

SEQ ID NO: 22550 - protein, 56 aa, Artificial Sequence
  Synthetic
REEIEREVREDNKRLEELLERSEREVREDNKRLDEALKKIEKEARELVKRMREKAK

SEQ ID NO: 22551 - protein, 59 aa, Artificial Sequence
  Synthetic
REEEEIRRLLKENEESTRKVEEDNKRLNDENRRSTEKVSRDLEDLNRDTRRVMEEAERR

SEQ ID NO: 22552 - protein, 56 aa, Artificial Sequence
  Synthetic
LEEIKREVEEDNERLKELLKRSEKEVREDNKRLRDVLEKSREEHERLKKRLEEAAK

SEQ ID NO: 22553 - protein, 60 aa, Artificial Sequence
  Synthetic
SEEDEIRKLLEKNEKSTEDVERENERLNDENRKSTEDVKREIDRLLKELREVLDEARKKG

SEQ ID NO: 22554 - protein, 56 aa, Artificial Sequence
  Synthetic
LDEIRKTVEEDDKRLKDALERSKREVDDDNRRLKKVLDEIRKTVRTMIEEIKKAEK

SEQ ID NO: 22555 - protein, 61 aa, Artificial Sequence
  Synthetic
SEKEKADDLRRKSKESNDTLRKRLDELKKRSEKNNEELERRLRALLKRLEDVLREITKRTG

SEQ ID NO: 22556 - protein, 55 aa, Artificial Sequence
  Synthetic
DELVKEVEDLNRELEEKVKRLIEEMEELNKRLNDKVKELIEEVERLIKELEDRVR

SEQ ID NO: 22557 - protein, 61 aa, Artificial Sequence
  Synthetic
KDIDELIKRSEDLTRDLERKNKEVVDKIEELLREHEKTNREVVKELRRLLDEVRERVERRG

SEQ ID NO: 22558 - protein, 59 aa, Artificial Sequence
  Synthetic
EDLERKVRKAEEDNKRAVERSKTHVDEVRKEVERVLRESKRHAEKLAEDVERMIRELER

SEQ ID NO: 22559 - protein, 57 aa, Artificial Sequence
  Synthetic
STLEKLKKDLDDIDRDLERILDELRRRVERIDEELRKIVERLHRRNKEIIERLRKAK

SEQ ID NO: 22560 - protein, 55 aa, Artificial Sequence
  Synthetic
REIREAEKKHKKVLDDLRRKLEEVEKRHREVEKELRDRLEESRREHEKVIREETE

SEQ ID NO: 22561 - protein, 56 aa, Artificial Sequence
  Synthetic
RELEELEKEVRKRLKEAEERVRDLAKKSRDLNRELKDRLRRIVEENRDVNRKVKEK

SEQ ID NO: 22562 - protein, 56 aa, Artificial Sequence
  Synthetic
DEDLRRVEEEIRRVIERLKRLLERVEEENRKSRKELRETLERLHRENEKSLREKET

SEQ ID NO: 22563 - protein, 60 aa, Artificial Sequence
  Synthetic
SLKERLDRVEEKIRKVLEELDRSTSRVEKKVEEVLRELKRSNDEVRKEIKKVLDELRKRG

SEQ ID NO: 22564 - protein, 57 aa, Artificial Sequence
  Synthetic
VVDEVAKRMTEELKKLDKENKEIEKEVDDILKRLKDEDKKTVDTLRKILKELDDDAR

SEQ ID NO: 22565 - protein, 60 aa, Artificial Sequence
  Synthetic
SEIEEVEKEMDKLAEESNKLNEEALRRVRKLLRDSNELVRELERRVRELIKRAKDLKREG

SEQ ID NO: 22566 - protein, 59 aa, Artificial Sequence
  Synthetic
EEVRRKIKEIKDRSEENIKRSRDSVREIKKESDENIKRLKRELERIKKRLEEVLRDLKR

SEQ ID NO: 22567 - protein, 59 aa, Artificial Sequence
  Synthetic
KDEEDLAREVKRVIDELEKLNEELNRAAEELIKRAEEINERVNRKVEKVERDLDKLKKR

SEQ ID NO: 22568 - protein, 55 aa, Artificial Sequence
  Synthetic
ETLRKLRDDLRKALKKSEDNIEDVRRRLEEVLERARRNLERVRRRLEEVLRKLKE

SEQ ID NO: 22569 - protein, 60 aa, Artificial Sequence
  Synthetic
SAAERLEKAVRDLIEELKRLNEELNKAVKEIIRRLRELNKKLNEDAERLIRKADELKRRG

SEQ ID NO: 22570 - protein, 56 aa, Artificial Sequence
  Synthetic
KEILDKLREELKRALEESEENLRRLRRELTEVLRESRENLERLKEEVERVLKRLAD

SEQ ID NO: 22571 - protein, 58 aa, Artificial Sequence
  Synthetic
SVVEDLEEKVKRLIERIERENRRLNKDADRLVRELDELNERLNRAIRRLIRKAEEARK

SEQ ID NO: 22572 - protein, 56 aa, Artificial Sequence
  Synthetic
ERELERLKRELEKVLRESEKNLEDLERKLKEVLDRSRENAKRLEDELREVLERLRK

SEQ ID NO: 22573 - protein, 58 aa, Artificial Sequence
  Synthetic
SVVEDLAKKVEELIRRLEELNKELNKRVRDLIEKLRDINRKLKREVERLIEEAEEVRR

SEQ ID NO: 22574 - protein, 56 aa, Artificial Sequence
  Synthetic
KDELKKLEERAREVLRKSEENLKRVEDELREVLRESEETLKRLEEELRRVLDELRK

SEQ ID NO: 22575 - protein, 60 aa, Artificial Sequence
  Synthetic
DEEKKAEDDIRRIHRRNEDLLRRHREITEEIEKRIRELLREHREITKRLERRLRELKKEG

SEQ ID NO: 22576 - protein, 55 aa, Artificial Sequence
  Synthetic
EELKRIKKRLDESLREVEEDLKRSEKRLRELLKRVKEDLDRSRKRLKEILDELRR

SEQ ID NO: 22577 - protein, 60 aa, Artificial Sequence
  Synthetic
DEVRKLEEDVERLRREVEEENRRLEEEVERLRKEVKERNRELNERVKTLIETAKRLKEAG

SEQ ID NO: 22578 - protein, 56 aa, Artificial Sequence
  Synthetic
EEMLRELEKRLKRLADETRRSNKELKERLERLKDESRDNNRELKERADRLLEKLKE

SEQ ID NO: 22579 - protein, 60 aa, Artificial Sequence
  Synthetic
SEEEELRKLERRLEELMKEYKEALDKLREEHEKTLREYEKRVEDLEREHKKVLKKLVDDR

SEQ ID NO: 22580 - protein, 56 aa, Artificial Sequence
  Synthetic
LDDLRRKVDKLRKEVEDHVRELEKKSRKLVEELKDHLRKLEEESRRLNRELEERSR

SEQ ID NO: 22581 - protein, 56 aa, Artificial Sequence
  Synthetic
SKEDLRRELDRVNEESKKHLDKLRKEAEEVLERLDRANKKIIEDAEEILRRIEKKV

SEQ ID NO: 22582 - protein, 56 aa, Artificial Sequence
  Synthetic
RERIKREIEENRKRNEEIARKIKEDIERARRDLERLRKKHEEELEKLKKRVEDADR

SEQ ID NO: 22583 - protein, 60 aa, Artificial Sequence
  Synthetic
DEDRIRKELEKAHKETREESEKLNRDVERVLREVRKASKDLNDKFEEELRKLREKVERDL

SEQ ID NO: 22584 - protein, 56 aa, Artificial Sequence
  Synthetic
RDKVEEDLRRSRKELEDYARDLEDAIRRIEDRLRRYARKLEEDIKRLARKLEERER

SEQ ID NO: 22585 - protein, 61 aa, Artificial Sequence
  Synthetic
SRTERVKEELKRLVEEYKKRSDDSRRRNEKLTRDYREDSRRVEEELKRIKEDVERELRRRD

SEQ ID NO: 22586 - protein, 59 aa, Artificial Sequence
  Synthetic
DEEAKKDLKRVRDALDRLTKRNEEKDKENEDRLRKMLRENRERLKEVRERAKRIKEELK

SEQ ID NO: 22587 - protein, 63 aa, Artificial Sequence
  Synthetic
KEKEEIRKALKELLDDLERTLERLKREYDKLRKDLEDTDERIAREHKKIADDLDRTLKEARKK

SEQ ID NO: 22588 - protein, 55 aa, Artificial Sequence
  Synthetic
ERVLEEVKREVDRIKEELRRTLEENRRRIEEIKKRLEDILRESRERARELKEKLR

SEQ ID NO: 22589 - protein, 56 aa, Artificial Sequence
  Synthetic
SEAETILRRVRRRVEEILDRIRRKLEESKREVEKHRRDVKKVLDDVRRTVKRIKER

SEQ ID NO: 22590 - protein, 55 aa, Artificial Sequence
  Synthetic
EEVDTRLKEISKELEETLRRVTEEHKRLNRELEEVDRRAEKEVRKILKELRDTTK

SEQ ID NO: 22591 - protein, 61 aa, Artificial Sequence
  Synthetic
SKEEELREVLRRIERELERVNEELREENKRIDKELEEVNRELEERNKRINDTVEDLVRERG

SEQ ID NO: 22592 - protein, 59 aa, Artificial Sequence
  Synthetic
REELRKIAEKLKKNLEEHKKRVREYLKRLEENLKRHRERVEKYARDLKRDLDRLRERLR

SEQ ID NO: 22593 - protein, 60 aa, Artificial Sequence
  Synthetic
SEEEKLEKKAREIEEALRRVNEELKRRNKEIDERLEEVNRRLEKDLKKIEEDARKLVKDK

SEQ ID NO: 22594 - protein, 59 aa, Artificial Sequence
  Synthetic
EDELREIIERLERNLERHKRRVDKYLRDLEKNMRDHKRKVDEVVKTLEETLRRLEEEVR

SEQ ID NO: 22595 - protein, 60 aa, Artificial Sequence
  Synthetic
SEEERLREKVKRVEDDLRRLNEEYKEKHKRSEERNKKLLKDLKEVHDRVKKAVEDILRDT

SEQ ID NO: 22596 - protein, 56 aa, Artificial Sequence
  Synthetic
EEEVEERIRRALKESREEIDRLERRNEEEDKKSEETVRRMMERNDRVLKEVEERAR

SEQ ID NO: 22597 - protein, 60 aa, Artificial Sequence
  Synthetic
REEEELRRLVKTVEDEVEKLLRRYRDESEKVKRTLEELNKDLERKHKEVLDRIRDILRKV

SEQ ID NO: 22598 - protein, 56 aa, Artificial Sequence
  Synthetic
REDVERELEETLRDVARKIERLLEKNKRDLDRSKKRVEEMVRRNEKALKDVEDEIR

SEQ ID NO: 22599 - protein, 60 aa, Artificial Sequence
  Synthetic
SEREDLKRTVDEVKKRLEELIDDYRKTSEEVERRLEELLRRLREDHKRVAETIDDILRRV

SEQ ID NO: 22600 - protein, 56 aa, Artificial Sequence
  Synthetic
TEEVKERIRRDLERVKRKIEELKKKNEEDLRRADKKVKDMLEENRRTLEKAKRKAD

SEQ ID NO: 22601 - protein, 60 aa, Artificial Sequence
  Synthetic
SKEDEARKEIKRIEDEIERLRKELEDAHRKLREDLKRLRDENKKVLEDIKRRLKELEKDT

SEQ ID NO: 22602 - protein, 55 aa, Artificial Sequence
  Synthetic
DRVRKKLEDELRRLKRTVDELKKRNEKALRDVKRDSERHKEELRRALRKAEEDAR

SEQ ID NO: 22603 - protein, 61 aa, Artificial Sequence
  Synthetic
SLKEELDKAIRELKERHKRINEDLERVVRESRKNHEDINRRLKKLLEELEKRVEEIVRREQ

SEQ ID NO: 22604 - protein, 59 aa, Artificial Sequence
  Synthetic
DRVIREIKKRLEDLLRRTEERAKEVKDENRKRNEDTREEVRRVEEELKELLRRIEERER

SEQ ID NO: 22605 - protein, 59 aa, Artificial Sequence
  Synthetic
DEVREIIRELKERIDKIAKEIDDENREHRERLKEIAREVKELIKENRKELKRIADERKD

SEQ ID NO: 22606 - protein, 59 aa, Artificial Sequence
  Synthetic
EEIRKRLDEATKRAEDELRKLKEKNKEVLKELDDRLRKLEDEHRRVREEVDKRLDELRK

SEQ ID NO: 22607 - protein, 60 aa, Artificial Sequence
  Synthetic
DEREKIEKRIRELLKEDKEHTRRNEEKIRRLLDTNRRLLEEIAKKIEEIARELKERKKEN

SEQ ID NO: 22608 - protein, 55 aa, Artificial Sequence
  Synthetic
EEIRKLVEDYRREHEKLKRRNDELLERYRRAHEEIKKRIDELVERLEEILRKLAE

SEQ ID NO: 22609 - protein, 60 aa, Artificial Sequence
  Synthetic
SEKETIEKRIRDKLKDDEDHTKRNEERIRRALKEDEDRLRKIEEEIRRTLEELEREKRSN

SEQ ID NO: 22610 - protein, 55 aa, Artificial Sequence
  Synthetic
EDIERLEERYRREHERLKRRNEDLSREYEERHERLKREIDKLEEDLKRETERAAR

SEQ ID NO: 22611 - protein, 60 aa, Artificial Sequence
  Synthetic
SEKEKIKKEIEDARREDEKHTEKNKRDIERDERRDEETLKEIEERIRRTLRELEKDRESN

SEQ ID NO: 22612 - protein, 55 aa, Artificial Sequence
  Synthetic
EDIERLEREYEKDHKRLKDENDDLTEKYRRRHREIDERIKDLERELDRRIKEIDR

SEQ ID NO: 22613 - protein, 61 aa, Artificial Sequence
  Synthetic
DVRDRVRELRRRLEEETKKVDDENRKIHEELKRVADESRKNNERLNRELRKEIRRVEKDLG

SEQ ID NO: 22614 - protein, 59 aa, Artificial Sequence
  Synthetic
EEALRRLEETLKEVKDELKTELDDSRREVEEVKRSNKEKNERSERRLKEVRDRLREERK

SEQ ID NO: 22615 - protein, 59 aa, Artificial Sequence
  Synthetic
SLEDSAREIEKRLRDLHRRYREDHERIREDLERLKTEYEKAHRDIKRELDRLREELERA

SEQ ID NO: 22616 - protein, 60 aa, Artificial Sequence
  Synthetic
EKEMLDRLEEHVDRNEKDIKKALDENRKRLDDIRRKIKKALDENREELKRIERRIRELKK

SEQ ID NO: 22617 - protein, 60 aa, Artificial Sequence
  Synthetic
SAEETTEDLKRRLKELDEKVKEVLKRNEDRVRELEEDVRRNLKKNEDDAREVEERLKTSG

SEQ ID NO: 22618 - protein, 59 aa, Artificial Sequence
  Synthetic
EELLKEVEDRVREIIKRIEEKLKRLNDRTREFIERIRRELRKVNEETKKMIKELKEEED

SEQ ID NO: 22619 - protein, 60 aa, Artificial Sequence
  Synthetic
SKAEKVLEKAREVVETIKRLVEEVLRHSEDVVRRITDLVRRLLEENERVVREIKRLADEG

SEQ ID NO: 22620 - protein, 55 aa, Artificial Sequence
  Synthetic
ERVIKKIEDLLKKVDDEAKKMLEEVERLNKEVNDRLKRVLEEAERLHEEVNRRVK

SEQ ID NO: 22621 - protein, 57 aa, Artificial Sequence
  Synthetic
KELEDVIEEVKKLLKTVNEESRRVAEEVRKLIREVSEELTEVIRRVERLVEEVATRV

SEQ ID NO: 22622 - protein, 56 aa, Artificial Sequence
  Synthetic
LDTVLRRAEDIVRKNRKLAEEVLRRVKKIVEENRKIAKEVLDDVRKLVEDVLRRAT

SEQ ID NO: 22623 - protein, 57 aa, Artificial Sequence
  Synthetic
EELERVIEEVRKLVEEAEKKSREVIKTVKELMDDVNRKSKKVLDDVRRLIEKVRREV

SEQ ID NO: 22624 - protein, 56 aa, Artificial Sequence
  Synthetic
ADDALRRVKEIVERNEEVVKELLKRAEDIVRTNEKLVKDVLDTVRKLVKKVKDDED

SEQ ID NO: 22625 - protein, 59 aa, Artificial Sequence
  Synthetic
SEAEDALRKAKRLADEDRKAAKRALEEAKKSAEEVKKAAKRALEEAKRIAEDVKRAADE

SEQ ID NO: 22626 - protein, 55 aa, Artificial Sequence
  Synthetic
EEAAREAKKLAKDAADVSRKAAKDAKDLSKEAADVARKAAEDARRLAEEAARKAK

SEQ ID NO: 22627 - protein, 60 aa, Artificial Sequence
  Synthetic
SDAEDVVRKVKRLVDELRRHSKELLKEVEDLVRDLVRHSEEVVKRVEDLVRRLEELVRRG

SEQ ID NO: 22628 - protein, 59 aa, Artificial Sequence
  Synthetic
EEVRRVLREIREVLKKVAEDSRKVNEDIRRVLEEAKKTSDKVNTDSEEVLRTVARRFED

SEQ ID NO: 22629 - protein, 60 aa, Artificial Sequence
  Synthetic
SRAERLLEDVRRLLEESLRNSERVLEEVRKLIEENLRHSRKVVDEVRRLLEEVLRVVERG

SEQ ID NO: 22630 - protein, 59 aa, Artificial Sequence
  Synthetic
EDVRRVLEAIKEDLKRVEDANREINRRSEELLREAEKRSRDIDKESRDLVRKVKKDLEK

SEQ ID NO: 22631 - protein, 60 aa, Artificial Sequence
  Synthetic
SRAEEVLKDVKRLVDENRRHSERVVEEVRKLVTENKRHSERVVEEVRRLVEELERARRRG

SEQ ID NO: 22632 - protein, 59 aa, Artificial Sequence
  Synthetic
KDVRKVLKDIREVLERVEEDSERVNRESKKVLDDVKKESDEADDESRRVLEEVDRKARK

SEQ ID NO: 22633 - protein, 60 aa, Artificial Sequence
  Synthetic
DRVEELLKTVEKLVRDNEKHSRDVVKEVRRLAEENERHSERVVREVRRLVKELEDMKRRG

SEQ ID NO: 22634 - protein, 59 aa, Artificial Sequence
  Synthetic
REVREVLKRIEEILKDVKRKSEEVNRESERVLREVEKRSEDADRESKKVLDDVKEKARR

SEQ ID NO: 22635 - protein, 60 aa, Artificial Sequence
  Synthetic
SEEEVLKEIDEVSRDLERKNKTINEEIKKVSDRVAEEVRRVLEDIKRTSKDAVDDVRTRG

SEQ ID NO: 22636 - protein, 56 aa, Artificial Sequence
  Synthetic
LEKVVREVEESVKESEERSRRLLEEVRRSVKKLEEDVTRLLEENKKSVDDIKERAR

SEQ ID NO: 22637 - protein, 60 aa, Artificial Sequence
  Synthetic
REEEVLEEIRRVVEEVRRENERINKEIRERSEDLRRKVKRILEKAKKVLDDVDERAKREG

SEQ ID NO: 22638 - protein, 56 aa, Artificial Sequence
  Synthetic
VDEVLKEVEDLVRESVRLSEDLLREVRESVERLVDEARKLVREIERLVKEAVDTVR

SEQ ID NO: 22639 - protein, 60 aa, Artificial Sequence
  Synthetic
KEEEVLKEAEEVSRRAEEKNRRINDEVRRVVRRVEETVTRVLEDVERTSKEAKERVERAG

SEQ ID NO: 22640 - protein, 56 aa, Artificial Sequence
  Synthetic
LDTVVEEIKDSVRKSVERSRELLERVERIVTELEKRVDELVRENEDSVRRIDERVR

SEQ ID NO: 22641 - protein, 60 aa, Artificial Sequence
  Synthetic
SEAEKIVEEAKRLADKARELAERSVRHSEKLARDSEKAAREAVKEAKDLADKARDLAAKR

SEQ ID NO: 22642 - protein, 56 aa, Artificial Sequence
  Synthetic
KEALDTARKILRDAEEAAKEAHKEANRLNKEAEEAAKRAADEARKILKKAEEDARR

SEQ ID NO: 22643 - protein, 60 aa, Artificial Sequence
  Synthetic
DDLEEIVKRVRRIVEEIRRLVEELVRRDKRIVDEIKRLLEEDKRKVDEIVKEIEEVVRRG

SEQ ID NO: 22644 - protein, 59 aa, Artificial Sequence
  Synthetic
EEVRRVLKEVKDILKTVRDEVEEANEDAKRLNEEVREEAERVLRDTKRILDEVRKEADK

SEQ ID NO: 22645 - protein, 59 aa, Artificial Sequence
  Synthetic
REKEVLEEVRDIVRRASERSKEALDESREILKTVDDEVRRVLEDSRRLLEEVRKRVEDN

SEQ ID NO: 22646 - protein, 56 aa, Artificial Sequence
  Synthetic
AREIVERVRRLVDTSRRLVEEDVRRVREVVKELRKLLREDVKRVRDVVEELAKEAT

SEQ ID NO: 22647 - protein, 57 aa, Artificial Sequence
  Synthetic
SEMEDAKRKIEDLVRRVKDSLRDAERRIREVVERVERSLKEVEDRSRELLEDVKREG

SEQ ID NO: 22648 - protein, 59 aa, Artificial Sequence
  Synthetic
DESVRDAVREVEDLIRRLTEDNKRLVEEVKRLVDRASEENKKLNDTSKKVVDEIREREK

SEQ ID NO: 22649 - protein, 57 aa, Artificial Sequence
  Synthetic
EELERVKEEIDKLVKEVRRSLKDVERRSAELLKEVEKSLEEVERESKKVLDEVRKAG

SEQ ID NO: 22650 - protein, 59 aa, Artificial Sequence
  Synthetic
DKAVKTLLEDVRRLVREATEDNKRVNDESRELVERASRDNRRVNKESRDIVRRLEERTK

SEQ ID NO: 22651 - protein, 57 aa, Artificial Sequence
  Synthetic
SELEEVERRVEKVVKEVRDSLKKVKEDIEKVLRESHKRLRDVEREVRRVLEKVRRRG

SEQ ID NO: 22652 - protein, 59 aa, Artificial Sequence
  Synthetic
DKTVRDVLRRVRKLVEDATRANEKALDDVRKLVEKSRKLVEDVLERVRRLVKELEERTT

SEQ ID NO: 22653 - protein, 59 aa, Artificial Sequence
  Synthetic
DEVEDVVRKVRDLVRRVREAVRRLLEENRDLVRKLIEDSERLVREVEKLIKEVEDTVKD

SEQ ID NO: 22654 - protein, 59 aa, Artificial Sequence
  Synthetic
REELERVIKEIKDVVREVTKVVEKVIREAEKLNEDVNRRSEEVNKRIKKLVEDVARRVE

SEQ ID NO: 22655 - protein, 56 aa, Artificial Sequence
  Synthetic
DEAEEVKKLIDKVLREVEEVVRRVNKRDKDLLREVEKVVRDVNREDKRVLEEVERS

SEQ ID NO: 22656 - protein, 55 aa, Artificial Sequence
  Synthetic
EEIVREIEKVAEDIMRRNEELVKESEDVVRKIVRDNERLAEDSKRVVEEAVRREK

SEQ ID NO: 22657 - protein, 61 aa, Artificial Sequence
  Synthetic
SAIDRVRKTLEKLVERLERVLEESSKAVEDVKEKVERLLRELRERTKRIVDEVEDMVRKAN

SEQ ID NO: 22658 - protein, 59 aa, Artificial Sequence
  Synthetic
EEELDRLVKKVEDLVRRLEELARKSLKDIKKLLKDIEDRLRKSVEKSRRLAEEIKERLR

SEQ ID NO: 22659 - protein, 60 aa, Artificial Sequence
  Synthetic
DKADEAVKRVKDLIDDLKRRIDEVVKRSREVVRDIEKHAEDVVKESRRVVDEIKKLVTRG

SEQ ID NO: 22660 - protein, 55 aa, Artificial Sequence
  Synthetic
EEVEERVREVLRRVEKRVKEVNEESERTIRELERVSRRVNEESRRSIEEAKRAAD

SEQ ID NO: 22661 - protein, 61 aa, Artificial Sequence
  Synthetic
DAVERAKEESKRVLEDAERVVRRVEEEVRKMERKAEESLKDVRRKSEEVIRKVEEVVRRKG

SEQ ID NO: 22662 - protein, 59 aa, Artificial Sequence
  Synthetic
DKEVREVVEDSRRSVRRVEELVEKVVRDVKKLIEDHERRNRESVRESERSIKELEEKVR

SEQ ID NO: 22663 - protein, 59 aa, Artificial Sequence
  Synthetic
DDLERVLREVKRLVEENEKKVRRIVEESRELVERNKELLRRVVEEVRRLVKEVRDILRN

SEQ ID NO: 22664 - protein, 59 aa, Artificial Sequence
  Synthetic
EDKLREVRERIKRLLDRSHEAVRRASEKSKRSLEESHRAVREVEKRLKELLEDVREDVR

SEQ ID NO: 22665 - protein, 59 aa, Artificial Sequence
  Synthetic
DRLEEVVERVERLVRENVKRLEKVAEENRELVERNKRRLEEIVRRVRELIERAKRIVRD

SEQ ID NO: 22666 - protein, 59 aa, Artificial Sequence
  Synthetic
EDKLRDVERRAKELLEESHRVIRTVEERSKTVLADSHRVIEDVRRRLEELLREVAEEVR

SEQ ID NO: 22667 - protein, 60 aa, Artificial Sequence
  Synthetic
DEADEVVKEVEDRVRKLVRRLEESAKKSKELVERILKRVEDSVRRSEELVERIKREVERR

SEQ ID NO: 22668 - protein, 55 aa, Artificial Sequence
  Synthetic
EKVEEMLRRVLEEVRRAVRKSSEDNKRSVEEVKRVLEKAEEDNRRVVEEVDRELK

SEQ ID NO: 22669 - protein, 60 aa, Artificial Sequence
  Synthetic
SKLEEVEKMVRKVIEDSRRVNEEVNRRSEEVVRELEKVHREVNDASRRVVEKARRVLKEG

SEQ ID NO: 22670 - protein, 58 aa, Artificial Sequence
  Synthetic
KEADEVVERAERISEENKRRVEDVARKSKELVEDVRRHSEEVVRRVEELVKEVEERVR

SEQ ID NO: 22671 - protein, 60 aa, Artificial Sequence
  Synthetic
SLLEDVKRTVREVVRESRRVHKEVNDDSRRVLKRSDEAHERVNRDSRRVIERIREVLSRG

SEQ ID NO: 22672 - protein, 58 aa, Artificial Sequence
  Synthetic
EEVRELAEDARRISEDNRRNSKRVVDRVREISKENEDNSRRVVDRVRKLAEEVEREVR

SEQ ID NO: 22673 - protein, 60 aa, Artificial Sequence
  Synthetic
DDLERVKETVKKVIKRSRDSTKKVADTLREVVRESERVHREVNETSRRVEEEAKRVASRG

SEQ ID NO: 22674 - protein, 58 aa, Artificial Sequence
  Synthetic
EEVDKLADRARRLVAKSEEDNKRVMKEVTDISKENEDNSRRVVDEVRKLVEEVRRRLE

SEQ ID NO: 22675 - protein, 60 aa, Artificial Sequence
  Synthetic
DKVERVVEEIRDLMRRVEELIKKAADDNRKLVKEVEDLIRDAVRDSERLVAEVEKLLTKE

SEQ ID NO: 22676 - protein, 55 aa, Artificial Sequence
  Synthetic
DEVRKEVKRVIKAVEKVIEDVERTSEEARRRVEKVIKEVEEKNREVIKRVEDRIR

SEQ ID NO: 22677 - protein, 60 aa, Artificial Sequence
  Synthetic
SEADKLVEEVKDVVREDKRRVKEIVETVRELVRRSRETVRRIVETVEEVVRRLLELLRKG

SEQ ID NO: 22678 - protein, 55 aa, Artificial Sequence
  Synthetic
EKVEEVLRRVKRESEKVIEDVERELKRVEDDDRRVIEEVKKRLKRVLERVRTESK

SEQ ID NO: 22679 - protein, 59 aa, Artificial Sequence
  Synthetic
READELVDRVKKVVEEDKRLSKELVDEIERVVDELEKVSRELVERVRDLVRRLLEVAAK

SEQ ID NO: 22680 - protein, 55 aa, Artificial Sequence
  Synthetic
DKVEKVLKRVEEESREASERNERVIERVERRVDEASKRNEDEIDKVRKEVERVAT

SEQ ID NO: 22681 - protein, 59 aa, Artificial Sequence
  Synthetic
EEVKELVERVRRVVDDLRKKLEKIVEEVRDVVRKDEERSRKLVEDVKDLVRKILEVLRK

SEQ ID NO: 22682 - protein, 55 aa, Artificial Sequence
  Synthetic
DDLRRVLKEVDEEVRKVIEDVARVLEEVKRRSDRASRENEEVIKRVTEEVKRVVK

SEQ ID NO: 22683 - protein, 60 aa, Artificial Sequence
  Synthetic
DRVEKLVEEVKRHVTEVLKTVEDLARRIRDHVRKVEDTSRELVKEIKRLVEEILDRVRKK

SEQ ID NO: 22684 - protein, 59 aa, Artificial Sequence
  Synthetic
EDVVRELRRVLRESNEKLKEVVDRLRKVLEESTKRVEDASRRVERVLEKVEEDVKREAT

SEQ ID NO: 22685 - protein, 60 aa, Artificial Sequence
  Synthetic
SEVEELKERIREIVERIEETVRRLAKRVEDHVREVEKDSKRLADEIRDFVRRITDEVRKK

SEQ ID NO: 22686 - protein, 59 aa, Artificial Sequence
  Synthetic
KRLVDKLRKVLEEVREEVERVVRELEEVLRRSTKRVEDASRELERVLKEVKETLEREVR

SEQ ID NO: 22687 - protein, 60 aa, Artificial Sequence
  Synthetic
DRVEALVDEVKRHVTELLKTAERLADEVREHVDDVRKKSKELVDEIRRVVEKILDEVRKK

SEQ ID NO: 22688 - protein, 59 aa, Artificial Sequence
  Synthetic
EEVVRELRRVLRESNEELKKVVTELEERLKDSNEEVKKASAEVRKVLEEVRADVDREVK

SEQ ID NO: 22689 - protein, 57 aa, Artificial Sequence
  Synthetic
SLVEKLRRVLEEVRRTSEKVIRDVKEVNKRSEDKTREIVRRLEEVNKESKERLDRAG

SEQ ID NO: 22690 - protein, 59 aa, Artificial Sequence
  Synthetic
KELAEKLAREVKRLVDESKKNMDKSVEDSRRLVRESEENVRKSVEDSRRLVKRAVEETK

SEQ ID NO: 22691 - protein, 60 aa, Artificial Sequence
  Synthetic
RVDEDLRRVLKEVKERNEEVVRRSKEETDRVEEDIERVIRDSERVSEEVKRRVDKAKKDV

SEQ ID NO: 22692 - protein, 59 aa, Artificial Sequence
  Synthetic
EELAKEVVKRVRELVDRSRRLMTESVRKVRELVEDIRRRVRESVEKLRRLVEEIERRIR

SEQ ID NO: 22693 - protein, 60 aa, Artificial Sequence
  Synthetic
KEVEKLVKDVERMVEESLKENERLVKKSDELVKESEKRNKELAERSRRLVKEITDRLAEE

SEQ ID NO: 22694 - protein, 59 aa, Artificial Sequence
  Synthetic
EDVLRDLRRVVEEVTEKIKEVNRRSEEANKRSKDRIEEVNRRSEKVNEDVEREIERALR

SEQ ID NO: 22695 - protein, 60 aa, Artificial Sequence
  Synthetic
DELEKAVERVKDIVRKSLELLKRLADRVRDIVREILDEVRRNVEEVRRIVKEIVEEVRRR

SEQ ID NO: 22696 - protein, 59 aa, Artificial Sequence
  Synthetic
EEALKRLERVVREVAEESDRANKELDRVVEEVKERVERVLRESNKVVKEVEDRVREETR

SEQ ID NO: 22697 - protein, 57 aa, Artificial Sequence
  Synthetic
SVKETVEEEVRRVSDEDRRINRDVERVSEESNRRLDKVHKELEEVVKEVLKELDDTG

SEQ ID NO: 22698 - protein, 59 aa, Artificial Sequence
  Synthetic
EETARRVVEEARRIVAESKELVKEVVRRSDELVRDVEKHSRDVAKTVRKIVTDVARRTR

SEQ ID NO: 22699 - protein, 57 aa, Artificial Sequence
  Synthetic
SAEETLEKVIRDVEEEDKKAHEDSRRVIETVKEEIDRVHKDSKRKIDEVKERIRREV

SEQ ID NO: 22700 - protein, 60 aa, Artificial Sequence
  Synthetic
LEERVRRIVKEVREIVKRSKERSDEIVKEVKRIVKEALDLSREIVERVERIVREVVERAR

SEQ ID NO: 22701 - protein, 57 aa, Artificial Sequence
  Synthetic
EADERLRKRLKEVNERDKKAHEDSKRAIDRVREEDKRVLDTVREEIKRVKDEIRRAL

SEQ ID NO: 22702 - protein, 60 aa, Artificial Sequence
  Synthetic
LERLVREVVRENEELVTRSEELSRRIVEEVKRIVDESRKRAKEIVDEVRKRVKELVDTDK

SEQ ID NO: 22703 - protein, 57 aa, Artificial Sequence
  Synthetic
DVREKLEKVLREVERRVEKASRESKETLDRVRKRLKDVSDESKRELERVKKRVDDAD

SEQ ID NO: 22704 - protein, 59 aa, Artificial Sequence
  Synthetic
KKVIEELVEEVRRLVTEHERLSRELVDRVEKLVARHEELSKKLVTDAERIVKEVEERAK

SEQ ID NO: 22705 - protein, 57 aa, Artificial Sequence
  Synthetic
SALERLREVLERVLRRVKKVTDDARRVNERVNRKVDRVSEDSERELRRVLKRVREAS

SEQ ID NO: 22706 - protein, 59 aa, Artificial Sequence
  Synthetic
EEVLRELVERAKKLVDDHLELVERLVRESEKLVEDHLRRSKKIVEDVKRIVEDVERRVK

SEQ ID NO: 22707 - protein, 60 aa, Artificial Sequence
  Synthetic
DEVDKARKEVDRVVKESRKLVEKNVREVEEVVKTVEKLVEDVIRRVEDVVREVKELVTRG

SEQ ID NO: 22708 - protein, 59 aa, Artificial Sequence
  Synthetic
EELLDRVRKVVEDVSRKSKKALDESHEVVKRVKDRADEVLDKVRRAVEEVERRIETEAR

SEQ ID NO: 22709 - protein, 60 aa, Artificial Sequence
  Synthetic
DEVEKAVKEVERVVREVKELVDRNIDEVRKVVEDSKRLIDELVEDAKRVVKRVKELRDRG

SEQ ID NO: 22710 - protein, 59 aa, Artificial Sequence
  Synthetic
EELLDRVRRVVEEVKKEADRLLEESHRVVREVSERSKRALEEVKRVVDEVTERIKKDKD

SEQ ID NO: 22711 - protein, 57 aa, Artificial Sequence
  Synthetic
STKEKLDDVLRRVEEKAREVVEDNRRADRDVHRKARKVVEELRRVDEEVHETVKRVD

SEQ ID NO: 22712 - protein, 56 aa, Artificial Sequence
  Synthetic
VDEVVDRLRRLVEEVLRHSKKNSRESDEMVRRVTEEVREVVKESKERVDDVLKRVE

SEQ ID NO: 22713 - protein, 60 aa, Artificial Sequence
  Synthetic
KKVEEIMERLRRVAKEIKERVDRLVEKNRKSAKDLLDTIEDIVRKNRDLAEKIKDLARRR

SEQ ID NO: 22714 - protein, 56 aa, Artificial Sequence
  Synthetic
KEKLRRVLREVEEVVRRVKKKLDDSVRELREIIRRAERELREVDEEVRKVVEDVKR

SEQ ID NO: 22715 - protein, 59 aa, Artificial Sequence
  Synthetic
RVREELKKVEEEVREVVRRAKEKTRRVLEEMRKVVKDVDDESKRVVDEVKKVLEEVRAR

SEQ ID NO: 22716 - protein, 59 aa, Artificial Sequence
  Synthetic
EEVVKKVVDDIRKLAKDMDDHSKEVVDRIREVARRIEELNRELVRDLKDEVRRVKEKAK

SEQ ID NO: 22717 - protein, 59 aa, Artificial Sequence
  Synthetic
SVRETLKTVEEEVKRVIDRARKRDERVVREVERVLRDAMRKDEDVNRDVERVLRDVVRR

SEQ ID NO: 22718 - protein, 59 aa, Artificial Sequence
  Synthetic
KDVFKRVVEELRRLVKRVEELVTRTVEEIDRIAKEVTRHSEETVRRLKKLVKTVTDEAN

SEQ ID NO: 22719 - protein, 59 aa, Artificial Sequence
  Synthetic
SSVREVVKEARDIAKENLERVKKTVKENRDLARKVAEDVKKSVEELRKLAEDVEEIARK

SEQ ID NO: 22720 - protein, 59 aa, Artificial Sequence
  Synthetic
EELEKELRTVVREVEEVLRRSEEDDRRVHKEAEDVIKKVEEDDKEVVDRVKKVIRDVRT

SEQ ID NO: 22721 - protein, 59 aa, Artificial Sequence
  Synthetic
SEVEKIVKEAEDLVREVKRRVEDTVRKNRELADRVRKEVDKSVRELRELVKRVLDIAKD

SEQ ID NO: 22722 - protein, 59 aa, Artificial Sequence
  Synthetic
EELRRELERVIKKVEEVIRKAEEDDRTVHRELNKIIKDVEDKDRTVVEEVERVIEEAER

SEQ ID NO: 22723 - protein, 59 aa, Artificial Sequence
  Synthetic
SEVDEVVERARRIAKENLDRVKKIVRENRELVEKVRKDVEDSVRTLKKLVDDVTEIARK

SEQ ID NO: 22724 - protein, 59 aa, Artificial Sequence
  Synthetic
DDMRRKLETVVKEVEDILRRSREEIRTVNEEVEKVIEEAEREDERVVREVEEVIKRVEK

SEQ ID NO: 22725 - protein, 59 aa, Artificial Sequence
  Synthetic
SSVEDVVRKMRKIVEDNKREVEKIVRENRKMAKDNEDLVKESVKDLKRLAKELEDLAKD

SEQ ID NO: 22726 - protein, 59 aa, Artificial Sequence
  Synthetic
EDLERTLRTVVKEVKEVLDRSRDLVRRVNEEVKRVLDRSREEDERVVREVEEVIRRVET

SEQ ID NO: 22727 - protein, 59 aa, Artificial Sequence
  Synthetic
REVDEIVDRLRRIAKENKDRVRELVERNRKLAEEVRRRVEESVKRLRDLVRTIEELARR

SEQ ID NO: 22728 - protein, 59 aa, Artificial Sequence
  Synthetic
EDLERKIREVVREAEEVLRESKREMDTVNKEVREVIEDVRKRDEDVIREVEKVIREVEQ

SEQ ID NO: 22729 - protein, 59 aa, Artificial Sequence
  Synthetic
SEVDEIVKEIREIARKNKEDVRRTVEDLRRLVKEVEKRVEDSVRTMRDLVRRLEETARR

SEQ ID NO: 22730 - protein, 59 aa, Artificial Sequence
  Synthetic
EELERKLKTVIDEAEKVLRESEEDDRRVVEEVERVIKKVEEEDRKAVREVEKVLEDVRK

SEQ ID NO: 22731 - protein, 60 aa, Artificial Sequence
  Synthetic
REVDELLKRIKEVADDIKRLSDENVKEIEKLAREVEKLVRDVVRENEEVAKEIEDLARRR

SEQ ID NO: 22732 - protein, 56 aa, Artificial Sequence
  Synthetic
KKKLRDVLRELEKVVRDVAKEDEDANRRLKEVAERVKREIDEVDKKLKKVLDDVRK

SEQ ID NO: 22733 - protein, 60 aa, Artificial Sequence
  Synthetic
REEEKLRKVLEDAKKVSKEVNEEDDRVNKEVEDVLREVKKEIDEVLKRATETVERVKREN

SEQ ID NO: 22734 - protein, 56 aa, Artificial Sequence
  Synthetic
VDEIVKRIKELVDRSRKLSEENVRRLKKIVKRVKERVKELLDRIKEMAKEIEDRVR

SEQ ID NO: 22735 - protein, 60 aa, Artificial Sequence
  Synthetic
DEEKKLKEVLDRATKVVKDVAEELDRVLEDVERVSRDVNRRDEKVNRDADRVLREVKDEN

SEQ ID NO: 22736 - protein, 56 aa, Artificial Sequence
  Synthetic
VEEIVRRIEEVAKTLREIVRRVLEELKEVVKESERLSRENVRRIEKLAEEIRRRVK

SEQ ID NO: 22737 - protein, 60 aa, Artificial Sequence
  Synthetic
DEDEKLRKVLEELRRVVEEVKRRSDKALEDAERVLRRVKKEDRDANKKAEDELRRVIDEN

SEQ ID NO: 22738 - protein, 56 aa, Artificial Sequence
  Synthetic
VDEILKRIEELMKEIRKLVKEDVDRIRDLVRRIDEESKENVKEIERVADEIRERIR

SEQ ID NO: 22739 - protein, 60 aa, Artificial Sequence
  Synthetic
KEVEDVLREVEKVVEKIKRDVEKIVKDSKELAKRVEELVKESEDRSKEIVDRVEKLRREG

SEQ ID NO: 22740 - protein, 56 aa, Artificial Sequence
  Synthetic
EEKVEKVLRKVRDVVRRVKEKVEEVHRRSREMLKRVEDRDREAHERSRKVAEDVKR

SEQ ID NO: 22741 - protein, 60 aa, Artificial Sequence
  Synthetic
SEVDEVLETIERIVREVKKLVKRSVEESERLVDEVEKLVEKSVREIKEIVDRIRDMKTKG

SEQ ID NO: 22742 - protein, 55 aa, Artificial Sequence
  Synthetic
EKVERVLEEARRVIEEVEREDDDAHRKSKEVLKRVLEKDRKALEDAKKVVEEVKR

SEQ ID NO: 22743 - protein, 59 aa, Artificial Sequence
  Synthetic
KEVEDLERRNKELVERVDKLSRENVERNKKLAKELKEISEENVRRNRKLAEELKEVADR

SEQ ID NO: 22744 - protein, 59 aa, Artificial Sequence
  Synthetic
EDLRRRVKKSHDEVERELRRVDREDETSHEELRRVLEKVKREDRKSHEEVKRRLDEVRR

SEQ ID NO: 22745 - protein, 59 aa, Artificial Sequence
  Synthetic
SEVDEIVKRNDDLAKEVKRLSTENVKRNKELADRVKRLSTENVKTNEKLAKDLERVVRR

SEQ ID NO: 22746 - protein, 59 aa, Artificial Sequence
  Synthetic
ERLRRKVEKSHRDLREVLERVRREDERSHEEANKVLEDVKREDEKSHRDVKKRLDDVRR

SEQ ID NO: 22747 - protein, 60 aa, Artificial Sequence
  Synthetic
SEVDRLLEKLEELVRKVRRDVEENVKKNDELAKEVERLSKRNVERNEELAKEIEDLARRG

SEQ ID NO: 22748 - protein, 59 aa, Artificial Sequence
  Synthetic
EELKEKVKRVMEKVKRVLDRVREEDEKSHRKADRVLREVEKRDRDSHERLRKVLDDVRR

SEQ ID NO: 22749 - protein, 59 aa, Artificial Sequence
  Synthetic
DEVREIVERNERLAREDKKIAEENVRRNEDLVRRLRELSRKNVEDNRRLAKELEEVAAR

SEQ ID NO: 22750 - protein, 59 aa, Artificial Sequence
  Synthetic
EELKKRVKDSHDKLREVSKRSEELDRKSHEDLKEVLKEVRERDDRSHEELRRVLEEVKR

SEQ ID NO: 22751 - protein, 60 aa, Artificial Sequence
  Synthetic
DEVERILERIDELVKRVKELSRRNVERNKELVERVDRLVKDNVDRNRRLAEEVDRLKKEG

SEQ ID NO: 22752 - protein, 59 aa, Artificial Sequence
  Synthetic
EELTKKVEKVVKDAKKTLEEVKREDEDSHKKANDVLRRVRELDKRSHDELKRVLDEVER

SEQ ID NO: 22753 - protein, 59 aa, Artificial Sequence
  Synthetic
SEVEDVLKKLDDIAKEVTERVKRVLDRNEEIVDEVEKLVEEVVRRNKEIVKEVKRLKDE

SEQ ID NO: 22754 - protein, 58 aa, Artificial Sequence
  Synthetic
DLEREVRRVIREVEKVIDDVRREVERSIRKSEKDIREVEKRVEDVNREVEEAIRRVRT

SEQ ID NO: 22755 - protein, 60 aa, Artificial Sequence
  Synthetic
REVEELVKKLKELAERSLTAVERIVEENERLLKRLEDESKRNVDDIERLARELLRRVEEE

SEQ ID NO: 22756 - protein, 59 aa, Artificial Sequence
  Synthetic
ERVERILTKVIEDLERVDKAAHDILREVNERLREVMERVEKTNRTVNRRLEEVLKEIER

SEQ ID NO: 22757 - protein, 59 aa, Artificial Sequence
  Synthetic
DEVEEIAREMREIVDRVLKLSEKTVRENRESVERLLRLSEETVRRIRDLVRRLEELARD

SEQ ID NO: 22758 - protein, 59 aa, Artificial Sequence
  Synthetic
EEMKEKVERAVEEVKRVLDRVRETDKRVNEEVRKVNEEAERIDEKVVREAREVLKRVRD

SEQ ID NO: 22759 - protein, 60 aa, Artificial Sequence
  Synthetic
RVAERLEDVLRELDRTLKDVARKLEEANRDNKRVLEEVAEILKRVLDDLRRVLDEVAKRL

SEQ ID NO: 22760 - protein, 59 aa, Artificial Sequence
  Synthetic
EKVVDDIVKEVRELAERIKEVVTESVKHSKKNVDEMRKLVDDVVKKVKKLVEDVRREIK

SEQ ID NO: 22761 - protein, 60 aa, Artificial Sequence
  Synthetic
SVAEKLRKVLEELRDVLRRVKEISRRSLERLKKVLKELADRLKELNDKLRKTLEELRKDV

SEQ ID NO: 22762 - protein, 59 aa, Artificial Sequence
  Synthetic
EELVEEIVKEIKKLAKEVAETVDKVAKENEKLAKEAKEKVEESERDVERLLEELKREAD

SEQ ID NO: 22763 - protein, 56 aa, Artificial Sequence
  Synthetic
DEEKILEDVLRELKKVLDEVRKTNEDANKRLKDVDDKSHEILKRVEERLREVVKRV

SEQ ID NO: 22764 - protein, 56 aa, Artificial Sequence
  Synthetic
VEDVVRRVRKVAEDVRRSSEETVKRIEDVVRRSEETVRELVKRVEDLVREMEEEAK

SEQ ID NO: 22765 - protein, 56 aa, Artificial Sequence
  Synthetic
SDEEKLRKVERELEEADKESHEINRTVNEDLRRVDRESKEILDRVRKELEEVKDKI

SEQ ID NO: 22766 - protein, 56 aa, Artificial Sequence
  Synthetic
VEDLVRRVRKVAEDSRRSSEDTVRRVERVVRESKRLVDDLVRRARRVVEEIKRTAK

SEQ ID NO: 22767 - protein, 56 aa, Artificial Sequence
  Synthetic
KEDEILKTVVDELRDALREVEERNRTVNEELRRADKESEDRLRKVVRELTEVMKRV

SEQ ID NO: 22768 - protein, 56 aa, Artificial Sequence
  Synthetic
VEELVRRVREVVKRVRDSSRETVERVKRVVERSRRLVERLVRKVEEVVREVEERAR

SEQ ID NO: 22769 - protein, 60 aa, Artificial Sequence
  Synthetic
SDVDRFLREVERLVERARKLSERDERETRKVVKEVRDSSRKSVEDSKRVVEKLEEEARRG

SEQ ID NO: 22770 - protein, 56 aa, Artificial Sequence
  Synthetic
KEKLDKVLEDLRRVVEEVKRRNDEVLKRLKEVVDEVTKRNRKALEDAKERLKKVTE

SEQ ID NO: 22771 - protein, 60 aa, Artificial Sequence
  Synthetic
SEVDEVAKRVREIVERLRDLVRKVVEDNERIAREVKRSSDETLKEIRDIVRKAKEVADRG

SEQ ID NO: 22772 - protein, 56 aa, Artificial Sequence
  Synthetic
ERKIDKVLKELEEVITDVRRTLDDVDRKLREVVKKVEEINRRANEELERVIREVRR

SEQ ID NO: 22773 - protein, 60 aa, Artificial Sequence
  Synthetic
DDVERLLKKVEDIVRELRESSRKSVEEIKRIVKEVKRLVDEVVKENERIVEEAEDVMRRG

SEQ ID NO: 22774 - protein, 56 aa, Artificial Sequence
  Synthetic
REKLDEVLKRARDVLREVEKENDKANKELEEVAERVKKTLDDVDKKLEDVMRKVTK

SEQ ID NO: 22775 - protein, 60 aa, Artificial Sequence
  Synthetic
KEEEIVERVREKIKRVLDEVREIDKRAHDELRRVLKEVEDIVRKVHEDLKRVLEEVRREV

SEQ ID NO: 22776 - protein, 56 aa, Artificial Sequence
  Synthetic
VKTVVETVDKIAKEVRDLSRRSVEENRKLAREVREVVRKVVEDNRRLAREVRERVR

SEQ ID NO: 22777 - protein, 60 aa, Artificial Sequence
  Synthetic
DEDEKVEKVTREVEKALDEVRKIDEEAHRRLKRVLDEVRRIDETVHRDLKRVLDEVRERV

SEQ ID NO: 22778 - protein, 56 aa, Artificial Sequence
  Synthetic
VETVVERLRRLVEDIRRKSRESVERNRELVKEAKDVSRKSVEENKKLVRDITREAT

SEQ ID NO: 22779 - protein, 59 aa, Artificial Sequence
  Synthetic
SVDEIVERVERELKRVLDEVREIHDRARDELRRMHERSERIIRKVEEELERALKEVRDR

SEQ ID NO: 22780 - protein, 59 aa, Artificial Sequence
  Synthetic
DKVVREAVREVERVVTELLEESRRSVEKTERLVRRSEELIRKIVKEVKKVAREIREEVR

SEQ ID NO: 22781 - protein, 59 aa, Artificial Sequence
  Synthetic
SVDEILRKVKEELDRVLEEVTEIHRKAKEELDRAHDTSERIHREVKRELDRVREEVERQ

SEQ ID NO: 22782 - protein, 59 aa, Artificial Sequence
  Synthetic
EKVVKEVVDEVRKVVEEIRKKSKDSVDKTKRVVEESIRTSDEVVKKTEKLVREIEKEVR

SEQ ID NO: 22783 - protein, 59 aa, Artificial Sequence
  Synthetic
SVEEIVRKVTKELRDAHRRTEKILRDVDKELKEVLDRVRKIHRDVKERLEKVLDDVRKR

SEQ ID NO: 22784 - protein, 59 aa, Artificial Sequence
  Synthetic
EEVVTRAVERVKRAVKKSEDDVRRIVDENRKLVKEIEDRSRESVKKTEELIERIRKRVE

SEQ ID NO: 22785 - protein, 60 aa, Artificial Sequence
  Synthetic
NVEDILRKAEEEVRRMLAENERIVEEAKERAKRMLDESRKRLEEVLRRAREVLEEVDKRK

SEQ ID NO: 22786 - protein, 59 aa, Artificial Sequence
  Synthetic
EDVVRAVVEELRRLLEESIRHVRKVVREIEKLLREDIELVKEVVRRIERLLRELDKEVR

SEQ ID NO: 22787 - protein, 60 aa, Artificial Sequence
  Synthetic
RKVDELRKEVRRVVKESRDKAKRVVEEVKRLVEKSRRDVKRVVDENRRVVEEMRRKVKDR

SEQ ID NO: 22788 - protein, 56 aa, Artificial Sequence
  Synthetic
DKEVKDAEDELDKAHEDTKKILDEVKKELDDAHDETRRILEEVNKESETVLEEVER

SEQ ID NO: 22789 - protein, 60 aa, Artificial Sequence
  Synthetic
SLARRVEEEVKRVVDESEEKVRRVVKVNKEMVDDVRRLVKEVVDENEEVVKEVRDTVTKR

SEQ ID NO: 22790 - protein, 56 aa, Artificial Sequence
  Synthetic
REDVRRVEEELKKAHDDTKKILDDVDERSREALDEVRKELDRVNKRSDKALKDVRK

SEQ ID NO: 22791 - protein, 60 aa, Artificial Sequence
  Synthetic
SKAEELVKRVKEVVDKVRKLVEEIEEKVKRVVEKSRRDVTEVVKKNREVVKRVKDTVRRR

SEQ ID NO: 22792 - protein, 56 aa, Artificial Sequence
  Synthetic
EEIVRRAREELERVLDEAKRILEKVTRELDEAHKETEKILRDVNRESDKALEEVER

SEQ ID NO: 22793 - protein, 59 aa, Artificial Sequence
  Synthetic
SEDEKLDKVRKRLERAHEESKKISDKSEKDTRDAHRKTEEILDRVRKEMEEVLKRVRDR

SEQ ID NO: 22794 - protein, 56 aa, Artificial Sequence
  Synthetic
AEEIVKDVERVVKESEDLVRRIVEINERIVRESERLVKEVKDRVRDMVRRLAEEAR

SEQ ID NO: 22795 - protein, 59 aa, Artificial Sequence
  Synthetic
SVEDIIRKVEKEVEEVVEKVERILDTVRRRSEKVLRENKEILEEVKRRADKVLRDVERN

SEQ ID NO: 22796 - protein, 59 aa, Artificial Sequence
  Synthetic
EEVAKRLEDRVREIVRTLEDLVREIVRRSEESVRRSRESAKRVVDTVKRIVDELEKRVR

SEQ ID NO: 22797 - protein, 60 aa, Artificial Sequence
  Synthetic
DVEEIIRRVSDKARKVLDRNRKILEDVKRRSEEVLEENKRIVDEVDEIIDEVLKRVKKRS

SEQ ID NO: 22798 - protein, 59 aa, Artificial Sequence
  Synthetic
REVVDRAVKRVEELVKRSERSADEVRKRSTESVKESKRSAKKVVEDVRRLVEELERRVR

SEQ ID NO: 22799 - protein, 60 aa, Artificial Sequence
  Synthetic
SEEDIIREAERIAREALKRARKIAEDARRISEKALEDARRIAKEAHDISKKALEDAARKR

SEQ ID NO: 22800 - protein, 56 aa, Artificial Sequence
  Synthetic
AKRAAEEAKRLAEEAEEAAKRVADRNRKLAKEAADLAREVAKRSEELAREAAKKAQ

SEQ ID NO: 22801 - protein, 60 aa, Artificial Sequence
  Synthetic
REDEKIEEVKRRAEEVLKESKKIIEDVLKKSEEVIKEVREILEKAHRISAKVLDEVRKTR

SEQ ID NO: 22802 - protein, 56 aa, Artificial Sequence
  Synthetic
VDEVVERVERIVTKNLRLAERVVEENEKLVEDLRRLVADVVRTSKKLVDDVRERVR

SEQ ID NO: 22803 - protein, 60 aa, Artificial Sequence
  Synthetic
SEDEKVDEATKEAERVLREVRKIIKRAHDRSRDAEREVKRTLDEVRRETKRVLEDVDRTR

SEQ ID NO: 22804 - protein, 56 aa, Artificial Sequence
  Synthetic
VDEVVRRVKEIVRRLEELAKEIERRSDEIVEEIRRLVKKVVDENRKIVKKAEEDAR

SEQ ID NO: 22805 - protein, 60 aa, Artificial Sequence
  Synthetic
DEDEIIDEAKKRADEVLKRSEDILRRAREEVEKVLEEVRKIIEDVHRRSRKVLEDVRRKA

SEQ ID NO: 22806 - protein, 56 aa, Artificial Sequence
  Synthetic
VETVVRRVDEIVKRNEELARRLVEEAKKIVDDLRRLAEEIVKRSEDLVEKLKEDAR

SEQ ID NO: 22807 - protein, 60 aa, Artificial Sequence
  Synthetic
SIEDVLRDVARKLRTVVDEARKILDEVDKATEKVLREAERVIREVAKRDKKVVDEVRKGG

SEQ ID NO: 22808 - protein, 56 aa, Artificial Sequence
  Synthetic
AEDLLKLVEDVVRRIRKLAEDVKRENDKLVERIREVAEDVLRHSEETVEEARKAAE

SEQ ID NO: 22809 - protein, 60 aa, Artificial Sequence
  Synthetic
SSEEALKEVERRLEDVRREVKRVAEEIKKKDDKVNDDAREKLERVNRETKRVLEELAREG

SEQ ID NO: 22810 - protein, 56 aa, Artificial Sequence
  Synthetic
VEELKDKVRRLLEELKRLLEELDKHSARTIKEIRDLIETLRRINEKVIEDMKRRRD

SEQ ID NO: 22811 - protein, 60 aa, Artificial Sequence
  Synthetic
SELDEAKRLVDEVVRRLEELLREDKKLVAEVEREVRELLERNARLLKEVADRIRRLKEEG

SEQ ID NO: 22812 - protein, 59 aa, Artificial Sequence
  Synthetic
EKVVREIERLLRELEKALEDVERELRRSKDRLRKLAEEVKKVLDDSRRELERLREELRT

SEQ ID NO: 22813 - protein, 60 aa, Artificial Sequence
  Synthetic
KDIEDAVRDVRRKVKELIENSERVVRTVEKLVRELIDHSRKVVREVEKLAKELIELKRRG

SEQ ID NO: 22814 - protein, 56 aa, Artificial Sequence
  Synthetic
EEVLKEVDRVLREAEKRSKEINEESKRVLDKAERDSRRIDRKSEEVVKRAEEEVRT

SEQ ID NO: 22815 - protein, 60 aa, Artificial Sequence
  Synthetic
EEIERVLRRVTERLKELERHSEEVLREVERLVKEDEDLAREVVKRVEELIRTLRELKKRG

SEQ ID NO: 22816 - protein, 56 aa, Artificial Sequence
  Synthetic
RRVLEEVREVVDRAEKKIKELDDRSREVLKEVEKRSRDIIREIEEKLKDVEERVKD

SEQ ID NO: 22817 - protein, 60 aa, Artificial Sequence
  Synthetic
SKAEEVAKRVEDLAREDIKLAERAAREVERLARENIKLAREVAKRVEELARRLIEAARRG

SEQ ID NO: 22818 - protein, 56 aa, Artificial Sequence
  Synthetic
EKALKDAEDAARKAAEDSERAIERAERAAKDALKKSEDAAEEAKRAADKALEDAAR

SEQ ID NO: 22819 - protein, 60 aa, Artificial Sequence
  Synthetic
DEVRDLVRRVRELSEELIRRVRTLLREVEELSRRLIEESERLLREVRKIVEELIRRVERR

SEQ ID NO: 22820 - protein, 56 aa, Artificial Sequence
  Synthetic
ERVVKEAEEVVERANRESEKLLEDVKRVVEEANKTSEDILRAVEEIVRRVLEELKK

SEQ ID NO: 22821 - protein, 60 aa, Artificial Sequence
  Synthetic
SSKEVLERVAEKLKEVNERLKDVLRRVAEKLKRANEENKKVLERVRDILREVLRRLREKV

SEQ ID NO: 22822 - protein, 56 aa, Artificial Sequence
  Synthetic
VEEAERVVEKSVEEARRLAERVKEEVDRSVKHSEDNVREMRRLVEEIVKRVEEAAK

SEQ ID NO: 22823 - protein, 60 aa, Artificial Sequence
  Synthetic
REKEVLDRVEEILRDANRRNEKVLREVAEIIRTVIEDNKRVLKEVADELRRVLEELRDKV

SEQ ID NO: 22824 - protein, 56 aa, Artificial Sequence
  Synthetic
VEEMEDVVRRSLDHSRRNVEEAKKAVTKVVEDNKDNVRRIKEVVARVVEKAREEAR

SEQ ID NO: 22825 - protein, 60 aa, Artificial Sequence
  Synthetic
SEVEEVLRRSRESAKKSKEHSRELLEKVKRIIDDVKRLVREVLKRSRDSIKRVEDLTRRG

SEQ ID NO: 22826 - protein, 58 aa, Artificial Sequence
  Synthetic
EKVKEAVKESRDLLRKVEETNRRVNDEVRKLLEDIRRDVERAVEESERLLEDIVRKVK

SEQ ID NO: 22827 - protein, 57 aa, Artificial Sequence
  Synthetic
SDVERVLTEIRKLVEDIKRDVERVVDESRKLVEEAERDVERVITEVEKLVERIKREV

SEQ ID NO: 22828 - protein, 56 aa, Artificial Sequence
  Synthetic
ARELLKRVRELIKEHNRLNRESLKTSRKNIEDHHEDNKRSLEEARRIIEEVREAAR

SEQ ID NO: 22829 - protein, 60 aa, Artificial Sequence
  Synthetic
KELEDVEKEVEEVAKRVEDSIRRNREVVEKVKDEVRRLLDRNDELVDRVAKEITEAIKKG

SEQ ID NO: 22830 - protein, 58 aa, Artificial Sequence
  Synthetic
EKVKKVLEDVRRRLEELIKRSEDSAREVEKRLEDLRREVEESLERVERTLEDLVRRVK

SEQ ID NO: 22831 - protein, 60 aa, Artificial Sequence
  Synthetic
SELERLEERVRRIEEEVKRLLEEHREVSDRVAKENRRSNEESKREVRRIEEEVKDLSRKG

SEQ ID NO: 22832 - protein, 58 aa, Artificial Sequence
  Synthetic
EEVKKVVEDVKRRLDDLIRKAEKVVRDSERELKKLVDHSKEVVDRVRERLKELIEEAR

SEQ ID NO: 22833 - protein, 60 aa, Artificial Sequence
  Synthetic
SEVEDLERRVKRILEESDELVKRHEEKSRKIVKDLEDLLRRNEDTVEKILRELEKRIRDG

SEQ ID NO: 22834 - protein, 58 aa, Artificial Sequence
  Synthetic
ERVTRVVEKVRRLLEESKRRSKEVVKRSKDLLKEAEDRADESVRELRRKLKELEEKAE

SEQ ID NO: 22835 - protein, 59 aa, Artificial Sequence
  Synthetic
SELEDIRRLLEKLDREVKELLKRSRDLAKEMEERVRKLVKESEDELRKLAEKVDRIKKN

SEQ ID NO: 22836 - protein, 58 aa, Artificial Sequence
  Synthetic
DEAREVLKDVRRKVEELRKELTKVDKEIEEIVRELEKRLREVNERVRTIVDELAKRLK

SEQ ID NO: 22837 - protein, 56 aa, Artificial Sequence
  Synthetic
SMLEELDKEARELLKEVRRLVEDNDRLLEELLRRARELLERNDRISEKVADEVRKI

SEQ ID NO: 22838 - protein, 58 aa, Artificial Sequence
  Synthetic
ERMREVAKKVKDILKRAEEEVRESLERVRRELERVIRELEDSLRRNDKTLRDLIEERR

SEQ ID NO: 22839 - protein, 56 aa, Artificial Sequence
  Synthetic
SDLERLDELLKRVLEKARKLVKENDEHSEEVRKTVEKVVRDNDKLAEDLADKVEKI

SEQ ID NO: 22840 - protein, 58 aa, Artificial Sequence
  Synthetic
ERVKEVLDRVDEILKRVIKAAEESLKRSHEINRRLIKAAEDSLRRVKKILDELEERVR

SEQ ID NO: 22841 - protein, 56 aa, Artificial Sequence
  Synthetic
STLDKLRELLRRVEETVREVLERNDEHSKEVKRRVDKLLRENDEHSKELADLVRKI

SEQ ID NO: 22842 - protein, 58 aa, Artificial Sequence
  Synthetic
REMEKVLTDARRSLRRLEERVRESLERSHRINRKLRKDVRESLERSKRILDKLREEVR

SEQ ID NO: 22843 - protein, 56 aa, Artificial Sequence
  Synthetic
SVLEELRKLVEKVLREVDKLLKDNNRHSEEVEKTVKRLLDENDRLLEELADRVEKI

SEQ ID NO: 22844 - protein, 58 aa, Artificial Sequence
  Synthetic
EEAKKVLTEVRRTLEELERRVRKSLKDSHDINRKLEKEVRDSLKRVKDRLDELIKRVR

SEQ ID NO: 22845 - protein, 57 aa, Artificial Sequence
  Synthetic
RKAEEVLKRAKKIVDEVDKKNRESLERTRKIVEDVNEENREVLDRLRRRAEELKKEV

SEQ ID NO: 22846 - protein, 59 aa, Artificial Sequence
  Synthetic
DDVVRRIEEVIEKARRENDESVRRDEKLMKEVKDENKKTVDDIRRLLKDIEDKVREAKR

SEQ ID NO: 22847 - protein, 57 aa, Artificial Sequence
  Synthetic
SKLEEVVKRLEEIVRRVKRADEESLKRTRKIVEEVNRDNRRSLKESRDRVDELKKRV

SEQ ID NO: 22848 - protein, 59 aa, Artificial Sequence
  Synthetic
DEVVKRIEEVAKRNEELNRETVKRDEDLVREAKRRNEETVERDKRLVEKITKEVDETKK

SEQ ID NO: 22849 - protein, 56 aa, Artificial Sequence
  Synthetic
SLIETIRDLAKKLKEESDKSVETDKRLVEELRRRSKKTVDDIDELVKRLERMVEDD

SEQ ID NO: 22850 - protein, 58 aa, Artificial Sequence
  Synthetic
EDAKRVLEELKRIIEDLLRKNKKSLDDTEREVRRLIKENETVVRKLEEIVKRLEEKIR

SEQ ID NO: 22851 - protein, 56 aa, Artificial Sequence
  Synthetic
SLLEEIAELVERLRRESKESVKRDEELVDELKKRSEETVKEDKRLAEELDRLAKKI

SEQ ID NO: 22852 - protein, 58 aa, Artificial Sequence
  Synthetic
EEMKKVLDDLRREIKKLEEENERSLERTRDIVRKLDRTNEESARESEKIIREVVKEVK

SEQ ID NO: 22853 - protein, 56 aa, Artificial Sequence
  Synthetic
SLLERIKEEVEKLRKESEESVETDERLVEELKKEVKDLVEKDRKLAEDLKDEVDKD

SEQ ID NO: 22854 - protein, 58 aa, Artificial Sequence
  Synthetic
ERAKEVLRDLRRTVKELTDENEKSLERTRREVEKLIRELEESLRESRRRVKRLLEKVK

SEQ ID NO: 22855 - protein, 56 aa, Artificial Sequence
  Synthetic
SLLEEIERRVEELEDRSRKSVERDKELAKEVDDRNEESVRTDEELAKRLADLVRKR

SEQ ID NO: 22856 - protein, 58 aa, Artificial Sequence
  Synthetic
ERMEEVLKRLKEIVKELEERNRESLERTRRILEEVDRKNEESLKRSREIVRELDERVR

SEQ ID NO: 22857 - protein, 56 aa, Artificial Sequence
  Synthetic
SLVEEIERRVEKLAEEVKRLVERDRKEVEKLEKESRDTVREIEELADRLRDAVEKE

SEQ ID NO: 22858 - protein, 58 aa, Artificial Sequence
  Synthetic
DEMRKVLTRLREEVRRLLDELRRSLEDTKRTVEDLERKNKTVVDELRKTVAELERRAR

SEQ ID NO: 22859 - protein, 59 aa, Artificial Sequence
  Synthetic
SIDEVLKRIREISDDAKRKIKEVVEEIKKNADRLRREIERVLDEIRKVIRELLERIKRV

SEQ ID NO: 22860 - protein, 59 aa, Artificial Sequence
  Synthetic
DEDLERLLREVERRTRRHEEELERLLRHNNKVSKEVREELKRLLDRVREMLEDVDRKLK

SEQ ID NO: 22861 - protein, 59 aa, Artificial Sequence
  Synthetic
SVEEVRKEVKRISDEAREEIERVLERIKENAKRLIEDIRRVLEEIEEIIRRLEDEIRRV

SEQ ID NO: 22862 - protein, 59 aa, Artificial Sequence
  Synthetic
DEDLEELLRRLERISRESRKRLEELLKHNNKESEEVRKRLKELLDDVRRVVEEVRRKLK

SEQ ID NO: 22863 - protein, 59 aa, Artificial Sequence
  Synthetic
SIDEVLEELKRISTEAVERIRRVAERNRKSVEEVRKRIEEVAKRIREIATRLLERIRRV

SEQ ID NO: 22864 - protein, 59 aa, Artificial Sequence
  Synthetic
DEELKKLLDELEKISRDSDERLKESTKKVRDVNRESDKKLKELLKRVEDVLEKVDRELK

SEQ ID NO: 22865 - protein, 59 aa, Artificial Sequence
  Synthetic
SVDEVLERIRESAETILEEIRRVLERNKRSAETILEEIRDVARKIEKRIRDVLKKIEDV

SEQ ID NO: 22866 - protein, 59 aa, Artificial Sequence
  Synthetic
DEELRKLLEEVKKINDDSRRKLEKSTRDVKKVNDDSRRELERLLRKVEEVIRRVDEELR

SEQ ID NO: 22867 - protein, 60 aa, Artificial Sequence
  Synthetic
KLEELVEEVEKVVREVKKELEDVVRTVREVVKRSKDDLREVVKEVERINRELEERLRRLA

SEQ ID NO: 22868 - protein, 55 aa, Artificial Sequence
  Synthetic
TELLERVKTLIKEIRDRLRRLLEEVKRLVEESKKDLKRLLDENKRLVDEATKTAK

SEQ ID NO: 22869 - protein, 60 aa, Artificial Sequence
  Synthetic
SLEELLKEVEKVIRDVKRELEKVVRDIEENVRRSAKRLREAEEEVERINRRLEEELKKKT

SEQ ID NO: 22870 - protein, 55 aa, Artificial Sequence
  Synthetic
TELLKRVRDLIRRIRETLEKLLKENHDLSKRSKEDVERLLKENADLVKELTDRAE

SEQ ID NO: 22871 - protein, 60 aa, Artificial Sequence
  Synthetic
SLEDLLREVKRVIEEVKRELEEVVRRVKEIVERSVRDLRRVVDEVRRINTELEERLRRLT

SEQ ID NO: 22872 - protein, 55 aa, Artificial Sequence
  Synthetic
TELLRRVEELIKEIRKELKRLLDEVKDLVDKSKENAKKLLEDNKRLVEKIARDAT

SEQ ID NO: 22873 - protein, 60 aa, Artificial Sequence
  Synthetic
KLEELVREVEKVVDDIRKELEEVVRRVEEVVRRSKRTLEDVVRRVKKINDDLEKELRERS

SEQ ID NO: 22874 - protein, 55 aa, Artificial Sequence
  Synthetic
TELLEDVKRVLDEIRETLERLLRKVEELVERSKRNAEELLKRNEDLAKKVRDDAK

SEQ ID NO: 22875 - protein, 56 aa, Artificial Sequence
  Synthetic
DVEDVLRKIEEIIRRVLEEIKTVLDEIRKNNEKLKEDVDRVLAEIEKDSEDLKRKI

SEQ ID NO: 22876 - protein, 58 aa, Artificial Sequence
  Synthetic
ELAETILRRVEELVEEIRRRLKEILDRDHELSKRLKEELKKILDDNHKLSRDAAERAR

SEQ ID NO: 22877 - protein, 56 aa, Artificial Sequence
  Synthetic
SVEDVLREIKETSDDAARKADEVLKEIEKNNRRLKKEIDRVHEHTKEDSRRLKEEI

SEQ ID NO: 22878 - protein, 58 aa, Artificial Sequence
  Synthetic
DLMREMLERNRKLIEDLKRELEDILRRDHRLSKELLARLKESNEENHRLSKEIRERRK

SEQ ID NO: 22879 - protein, 56 aa, Artificial Sequence
  Synthetic
RVEDVLRKVEEIIRRLKEEIDRVLEKIRETSERAVKDIRDVLRRIREDSKRLKEDI

SEQ ID NO: 22880 - protein, 58 aa, Artificial Sequence
  Synthetic
EDAERIVEEVRKLVEEIRKELEDILRKNEKLIEDLKRELKKILEENHRLSREIRERRR

SEQ ID NO: 22881 - protein, 56 aa, Artificial Sequence
  Synthetic
SAEDVLREITKTSERAREDIKRVLDEIKRTSDEAVKTVTDIHEHTRKTSEDLKRKI

SEQ ID NO: 22882 - protein, 58 aa, Artificial Sequence
  Synthetic
EVLRKILEENRELIERLKKELKELLDRNRKLIEDLLREAEKSNEDNKELIKKAEEDAR

SEQ ID NO: 22883 - protein, 56 aa, Artificial Sequence
  Synthetic
SVEKVLEDITRELRRADEESKRALDHSAEVLKDLERRVKEVLDESREIIKELERRL

SEQ ID NO: 22884 - protein, 59 aa, Artificial Sequence
  Synthetic
DEEAKRVLDEVEKLVRELKKRNDELNEKTERLVRDLRRRLKDSLDKSRDLVRRLEEKAK

SEQ ID NO: 22885 - protein, 56 aa, Artificial Sequence
  Synthetic
SVEEVLDEVRRIIEELLRLSEEMLRHSEEVIRDLERVSREVLERSKRIIDELLREL

SEQ ID NO: 22886 - protein, 59 aa, Artificial Sequence
  Synthetic
DEVAKRAVEDVRRVVEDLERRNRTLNEKTKRLVEKLTRDNERSLKESKKVVDELREEAR

SEQ ID NO: 22887 - protein, 56 aa, Artificial Sequence
  Synthetic
SVEEVLDEIRKRIEDLKREVDEVLDRSRRIIETLKERVDRVLKHSRELIKRLKDKL

SEQ ID NO: 22888 - protein, 59 aa, Artificial Sequence
  Synthetic
DEEMKRALEEVKKLLDRLREELKRSLDESRKLVEELERRLRESNEESERLIRKLEREAD

SEQ ID NO: 22889 - protein, 56 aa, Artificial Sequence
  Synthetic
SVEDVLREVEKIIRELDRKSEKVLEDSKRVIEDLKRKVEEVLRHSETLIRDLERRL

SEQ ID NO: 22890 - protein, 59 aa, Artificial Sequence
  Synthetic
DELAKEMVDRVRELVKKLEEENRRSLEESKKLVEELARRLERSNTESKRLIDKLREEAR

SEQ ID NO: 22891 - protein, 56 aa, Artificial Sequence
  Synthetic
SVEEVLKDIEKKIRDLDRKVKEALRHSEEVIRRLEEEVKRVLDDSERILRDLKEKL

SEQ ID NO: 22892 - protein, 59 aa, Artificial Sequence
  Synthetic
EELMRRIVEKVEELVKELDKRLRESNEDSKRLVEDLSRRAKKSLEESRELVRELKKRAK

SEQ ID NO: 22893 - protein, 56 aa, Artificial Sequence
  Synthetic
SVEEVLDRIRKIIKELLDRSEEALRHSEEVIKDLERKVEEVLERSREVIRELLERL

SEQ ID NO: 22894 - protein, 59 aa, Artificial Sequence
  Synthetic
DEELKTMLEEVKKVVEELLRRNRKSNEDSKELVKELTRRLRKSLEDSKELVRKLEEEAR

SEQ ID NO: 22895 - protein, 56 aa, Artificial Sequence
  Synthetic
SVEDVLREIEEILRRLEKESDDALEHSRRVIKRLEEESDRVLEESRRVIEELERKL

SEQ ID NO: 22896 - protein, 59 aa, Artificial Sequence
  Synthetic
DEEMKKLLEDVKRLVDDLRRKNEESNRRSKELVDKLDKENKDSLKESRELVEKLEREAR

SEQ ID NO: 22897 - protein, 59 aa, Artificial Sequence
  Synthetic
SVEEVVREVEEKLRKLIDDVRRVVEENRRNTERLRKRVTEVVKRNEDILRRLEEDIRRV

SEQ ID NO: 22898 - protein, 59 aa, Artificial Sequence
  Synthetic
EEVAKTALRKVEDLLKKLKERAEDSSRDNHRISKELTEELEESSKRVKTLVDELRKTVK

SEQ ID NO: 22899 - protein, 57 aa, Artificial Sequence
  Synthetic
SVEEVLKESREISTRLAEEVKRVLDEIRRILERVKRINEKVNKDIEEILRRVKKTVG

SEQ ID NO: 22900 - protein, 59 aa, Artificial Sequence
  Synthetic
ERVAEKILKEDRDTVERLRKRVEDLLRDVRRLVEDSERKSRDLLRRVEELVRELKKRVD

SEQ ID NO: 22901 - protein, 57 aa, Artificial Sequence
  Synthetic
SVEEVLKESKRVSEELNELNKKVNDDIRKILEKVNRENKKVNEDIERELRKLEEEVG

SEQ ID NO: 22902 - protein, 59 aa, Artificial Sequence
  Synthetic
EEVAREILRDDKRTVEESKRESKRLLERVKKLVDRSAEESKKLLEDVKRLLEELRERAR

SEQ ID NO: 22903 - protein, 57 aa, Artificial Sequence
  Synthetic
RVDEVLDESKKVSDRLHESIRRVLEKIEEILRRVNEENRRVNEEMKRILDELARTVG

SEQ ID NO: 22904 - protein, 59 aa, Artificial Sequence
  Synthetic
ERVAREILKADRETVRRLEKRAKDLLDEVRDLVRESEKRSRELLKEVEDLVRKLTEEAR

SEQ ID NO: 22905 - protein, 57 aa, Artificial Sequence
  Synthetic
RVEEVLKRMRDILRRVNEINRRVNRELERSSREILERIREILDRIRRILERLEERVG

SEQ ID NO: 22906 - protein, 59 aa, Artificial Sequence
  Synthetic
EKVARDLLREVEELVKESEELSEELLRRSRRSNEESLRKAEKLLETVRRLVEELEKKTT

SEQ ID NO: 22907 - protein, 60 aa, Artificial Sequence
  Synthetic
SEAEAVEEEVRRLVEESEKRSKELLEDVERLVEESERRSKKLLDDVRKLVDDLKKELRRV

SEQ ID NO: 22908 - protein, 56 aa, Artificial Sequence
  Synthetic
DRVIERLKRILKEAHDKNKEVSDRIRKILEELHRKNRKVLEDIKRILDDVRREVER

SEQ ID NO: 22909 - protein, 60 aa, Artificial Sequence
  Synthetic
KEAEDLLREVEKLVRESKKLSEDLLREVRKSNERSKRESERLLREVERLVRELKDLRDKV

SEQ ID NO: 22910 - protein, 56 aa, Artificial Sequence
  Synthetic
DRIIERIKRILEKVHKINREASKRIKESLDRAHETNKRVLDRIRKIVDDVRREVER

SEQ ID NO: 22911 - protein, 56 aa, Artificial Sequence
  Synthetic
RLEEVKEELKRIATKLKEEIKENIRRLEESVEKIAKELAENIKRLEDILRDVKRKL

SEQ ID NO: 22912 - protein, 56 aa, Artificial Sequence
  Synthetic
GEELVERLRRVVEEVRERLKDSSRELRKINEDSRKKVEDSSREVKKVVEELERRDT

SEQ ID NO: 22913 - protein, 57 aa, Artificial Sequence
  Synthetic
KELEDVARKVEDLLRRIEKTNRDAIRESERLVRELKREVEKVEEESRRLLEEVERRI

SEQ ID NO: 22914 - protein, 56 aa, Artificial Sequence
  Synthetic
AKKLLDEVRKVIEDNRKRSEELLEENRKVVEDVSRTLERILRENERVADEVDKEER

SEQ ID NO: 22915 - protein, 57 aa, Artificial Sequence
  Synthetic
DELERVTEEIDKLSKDLERRVREVLEESRRLVEDVERVVREVLEEARRTAKDIADKV

SEQ ID NO: 22916 - protein, 56 aa, Artificial Sequence
  Synthetic
VDKLLEEVRKISEDSKERLKEILKRNEEVARRVKRELKRLLETNREIIRRVEERER

SEQ ID NO: 22917 - protein, 56 aa, Artificial Sequence
  Synthetic
RELEELLDKVRKIVEESKKRNEDLLREVREIVERSKEKIKKVLDEVRKIIETVRKS

SEQ ID NO: 22918 - protein, 58 aa, Artificial Sequence
  Synthetic
KEVEKVLRDVEELIRDSERASDRVLKDVEELIKDSERMSKKAEEDVDRLLRELDKDVR

SEQ ID NO: 22919 - protein, 61 aa, Artificial Sequence
  Synthetic
DSVERVAEEVRKLLEDIKRVSDEVTKRLRDLLEDLKRVSDKVRKDIERLLEDLEREVRRKG

SEQ ID NO: 22920 - protein, 59 aa, Artificial Sequence
  Synthetic
DRVLEEALRRVEELARRIKEHSKRVLETVRRLVEEIKKHSRKVLEEVRERIKRIKDELR

SEQ ID NO: 22921 - protein, 61 aa, Artificial Sequence
  Synthetic
SEVEKAEKDVRDLLKDLRRVSEKVKRAVEDLLRDLKRTSDKASEDAKRLLDDLRRKVEERG

SEQ ID NO: 22922 - protein, 59 aa, Artificial Sequence
  Synthetic
DRVVKEILDEVEKLIREIKKHSEDLLRKVRKDIKRVKDHTKRVLDRIRKLIEDIKRRLE

SEQ ID NO: 22923 - protein, 60 aa, Artificial Sequence
  Synthetic
DEVKELLDRVREEIRRDKERVKKLLEDSKRLNERDKREVKRLLEEVRELIKRLEDIIRKS

SEQ ID NO: 22924 - protein, 55 aa, Artificial Sequence
  Synthetic
EEVVKDLERLLRDLERVNDEVEKRLRDLTEDSKRFNDEVAREIEKLLEDVARTVK

SEQ ID NO: 22925 - protein, 60 aa, Artificial Sequence
  Synthetic
REAEELLKRVEDLIRRLKDMIRKLLEDSKRLNERDVETVKRLLEDVERTIREIKDEVRRD

SEQ ID NO: 22926 - protein, 55 aa, Artificial Sequence
  Synthetic
ERIVREVEKLLEKIKRDVDRVRRELERLTEESKRINDKAVRDIEELLEDLKRAVK

SEQ ID NO: 22927 - protein, 59 aa, Artificial Sequence
  Synthetic
DELERLLEDVERVSRETKKLLKKLLDDAKRVIDKNREDSRRSLEEVERVIREAKELLKD

SEQ ID NO: 22928 - protein, 62 aa, Artificial Sequence
  Synthetic
KDTERRVRDVVKKIRELSEDVEREAKKVIDRLKELLEDIERENRRVEEEIKKLLEDVERTAR

SEQ ID NO: 22929 - protein, 59 aa, Artificial Sequence
  Synthetic
KLVERLVKEAEDLTEEHKERLDRLLKENEKISRESKKRLKEILEENERVVEEVKKLLRD

SEQ ID NO: 22930 - protein, 59 aa, Artificial Sequence
  Synthetic
RKKVDEVRRRLEELHKELEKVVRDVKRTSEKLVRDSEDMARKVVKTSEDLLRELEEEAR

SEQ ID NO: 22931 - protein, 59 aa, Artificial Sequence
  Synthetic
SRAEDLVRRVEEMTRKHKKDLDDLLRENEEVSRRSKERIRKLLKDIKDVVDDVERVLRA

SEQ ID NO: 22932 - protein, 59 aa, Artificial Sequence
  Synthetic
RDKVEEVRERLKKLHTELEKRVREVKRDSERLVEDSERTVEELLRRVRKLLKEVRDSVK

SEQ ID NO: 22933 - protein, 60 aa, Artificial Sequence
  Synthetic
SEAERLVEEAERVTREHKKRLDDLLKEVRRVSEDSKRKLEKILKENEDVVEEVKELLKAG

SEQ ID NO: 22934 - protein, 59 aa, Artificial Sequence
  Synthetic
KEKVDRVRRELDRLHKELAEVVERVKRAVDKLLRDSEEEVKRVEERSERLLKEVADALR

SEQ ID NO: 22935 - protein, 59 aa, Artificial Sequence
  Synthetic
SDVDKLVDDVRRETEKHKKTARDLLDELRKVSEESRRRLKRLLEEITEVVERIKRVLEA

SEQ ID NO: 22936 - protein, 59 aa, Artificial Sequence
  Synthetic
EEEVRRAKEELDRLHKEVEDVVRDVTRELDRLLKRSREVVERVREEADRLLEEVERTLK

SEQ ID NO: 22937 - protein, 59 aa, Artificial Sequence
  Synthetic
SEVDELVERAERISRESKKTIKKILEDNERVSKRHKDELKKLLDELKRVVDEVRKVLER

SEQ ID NO: 22938 - protein, 59 aa, Artificial Sequence
  Synthetic
KEKVERALRELDRLLEESKRVVDEAEKTSDKLNKEVEEMARRVEEEVDRLLKEVRDDAK

SEQ ID NO: 22939 - protein, 59 aa, Artificial Sequence
  Synthetic
SEADELVKEIEDVSRRSKEELTRLLEEAEKVSREHKKTLEELLRRIEKVVRDIKEVLRG

SEQ ID NO: 22940 - protein, 59 aa, Artificial Sequence
  Synthetic
EKKVREVEKLLDKLLEESRKRAKEVLRALRELNREVAEVVRRVEERLRRLLKEVEEAVR

SEQ ID NO: 22941 - protein, 59 aa, Artificial Sequence
  Synthetic
SDVDKIVEEIERISRDSERRIREIVERNKKVSEDHKRELERLLKEMEKVVEDVKKVLKD

SEQ ID NO: 22942 - protein, 59 aa, Artificial Sequence
  Synthetic
KKKVDEARKKLRDLLERSKEVVKEAERRLEKSNRDVRREAERVRKALDDLLKEVDEAVR

SEQ ID NO: 22943 - protein, 59 aa, Artificial Sequence
  Synthetic
SRADELVERAKRMTDEHKKTAEDILRENKRVSDEHKKTLEKILRENEKIVDEVAKLLEE

SEQ ID NO: 22944 - protein, 59 aa, Artificial Sequence
  Synthetic
KDKVREVEEELKRLHKEVEDVVDTVRRTSEKLNDEVRKVVETVTRRSEELLEELRRRAK

SEQ ID NO: 22945 - protein, 59 aa, Artificial Sequence
  Synthetic
KEVEKLVTEIREMTERHKRTLEELLKEAEEVSRRHKEDLKRLLDENRKIVEEVARVLEK

SEQ ID NO: 22946 - protein, 59 aa, Artificial Sequence
  Synthetic
KDKVERVLREADRLHEEVRKVVEKVREELRRLNEEVRKVVEEVRRDSERLVREVEERAR

SEQ ID NO: 22947 - protein, 59 aa, Artificial Sequence
  Synthetic
SRVDELVDRARKMTEKHKEELKRIVEENRRVSKEHKERLEDILRRNAEIVERVKEVLKR

SEQ ID NO: 22948 - protein, 59 aa, Artificial Sequence
  Synthetic
EDKVRRALEELKKLHDELAKEAKRVEELLDKSNEEVEKVVRDVREASERLLEELERTAK

SEQ ID NO: 22949 - protein, 59 aa, Artificial Sequence
  Synthetic
DEVKKLVDDARRLTEKHKTDLERLLDEARKVSEEHKKRLEELLREIAEVAKEILKVLRK

SEQ ID NO: 22950 - protein, 59 aa, Artificial Sequence
  Synthetic
REKVKRVEETLERLHKEVEEVVRRVKKALRDLNDEVRRVVDEVRRRLEELLKRVEEEAR

SEQ ID NO: 22951 - protein, 63 aa, Artificial Sequence
  Synthetic
REVDEVEERVTRLLKKVRDVAEESRRRSEELLKKSRDVVEEVKKEVDKLLEEVRDMVRRVKDK

SEQ ID NO: 22952 - protein, 59 aa, Artificial Sequence
  Synthetic
GRVLKKLVEEVKKLADEIERELERTSKEIEELSRRSEEDLRRLVRKLREVVRKIEEDLR

SEQ ID NO: 22953 - protein, 63 aa, Artificial Sequence
  Synthetic
REVERVERELERLLEEVREVAERSERESKKLLEDTRRVVRKVKEDVRRLLEEVRDVVRKVKDK

SEQ ID NO: 22954 - protein, 59 aa, Artificial Sequence
  Synthetic
GDVIRRMVEEVEKLARRIKETLERTVRRLEELVRRSEKNLRTLVEEVRKAVERIKETLR

SEQ ID NO: 22955 - protein, 63 aa, Artificial Sequence
  Synthetic
SEAERVEEDVRRLLKRVEEVIKRSEERSRELLKKTEDVVREVRKRVKKLLDEVKDTLDKVRDK

SEQ ID NO: 22956 - protein, 58 aa, Artificial Sequence
  Synthetic
EVLDRLVEELRKLVEEIERDLERTVREIEKLVKDSDRNLEDMVRELRRVAERIKEELR

SEQ ID NO: 22957 - protein, 60 aa, Artificial Sequence
  Synthetic
REVDEVRRRAEELLKEVRDVVTESEKESRRLLEDTRRVVEDVKRRVDRLLEEVRDLLREV

SEQ ID NO: 22958 - protein, 58 aa, Artificial Sequence
  Synthetic
DVLRELVKRLEDVAREIKKRLEDTLRKLEEVSRRSKENLRELVERLRRIADEIRERLR

SEQ ID NO: 22959 - protein, 61 aa, Artificial Sequence
  Synthetic
DEVDRVREEIERLLREVEEVLERSERESRRLLREVEEMLERSDEEVRRLLKEVEEVLRDEL

SEQ ID NO: 22960 - protein, 58 aa, Artificial Sequence
  Synthetic
EVLEEILRRAKEEVEKLKRELERTVERLAELVEELKRELERSTREVRKTVEELKRRIK

SEQ ID NO: 22961 - protein, 61 aa, Artificial Sequence
  Synthetic
DEAEDLERRARELLEEVERVLEESIRRSEETVKEVEDMLRRSTEEVERLLKRVEDVLREEL

SEQ ID NO: 22962 - protein, 58 aa, Artificial Sequence
  Synthetic
ELLKRLIDEVRRLAEKIKEELKESSKRDEEKVEKLKKELKDSTDAVRELVERLEREIK

SEQ ID NO: 22963 - protein, 60 aa, Artificial Sequence
  Synthetic
DEVEELVKEVEERIKKVHKENEDVLRESEELMKRLHEENERLLREVEELVRRIRELRKRG

SEQ ID NO: 22964 - protein, 55 aa, Artificial Sequence
  Synthetic
REARERIRRLLTESRKSVEEVEKRLRELSKRSEESVERVERTARRLLKELEDMTR

SEQ ID NO: 22965 - protein, 60 aa, Artificial Sequence
  Synthetic
EEVKRLVEKVRKLIEDSKRRNRDVLRRVEELVRRVHRRNEEVLRRVEKLVEDIKELLRRG

SEQ ID NO: 22966 - protein, 55 aa, Artificial Sequence
  Synthetic
EEAEREIERLLEESKRSVEEVEERIRRLIRESEESVREVKERIDELLKDADRATK

SEQ ID NO: 22967 - protein, 60 aa, Artificial Sequence
  Synthetic
REVEELVKDVERLMREVHRRNEKVVEEVEALIRKSKEDNERVAREVERLVREVEKMLRRG

SEQ ID NO: 22968 - protein, 55 aa, Artificial Sequence
  Synthetic
REAKERIKDLVRKSRDSVREVRERIRRLLEDSKRSVDDLARRIRELLRKAAEKAR

SEQ ID NO: 22969 - protein, 60 aa, Artificial Sequence
  Synthetic
DEAEELVDRVRKLAEDVHKKNEDVLRESDALVKDSDRRNREALRRVEKLVEDVEELLRRG

SEQ ID NO: 22970 - protein, 55 aa, Artificial Sequence
  Synthetic
EEVKRRIKELLKRVEESVRTVEEELRRLSKESEESVKRVEDRIRELLKRLRDAAR

SEQ ID NO: 22971 - protein, 60 aa, Artificial Sequence
  Synthetic
DEAEDLVRKVRKLIEESKKENEDLLREVRELVARVHEENERVLREVEKLVEDIRRLLRRG

SEQ ID NO: 22972 - protein, 55 aa, Artificial Sequence
  Synthetic
REVKKAIEDLLKESEDSVREVEEEIRKLLKDLEKSVRDVERAIEKLLDELRKDTK

SEQ ID NO: 22973 - protein, 60 aa, Artificial Sequence
  Synthetic
REVEELVREAEELVRRVHKRNEDALRRSKKLVEDVHRKNEEVLKRVERLVERIEELLRRG

SEQ ID NO: 22974 - protein, 55 aa, Artificial Sequence
  Synthetic
KEAAERIKRLIDEVRKSVEEVERRAEELSRELRRSVKEVRDALKRLLDDLRRATT

SEQ ID NO: 22975 - protein, 60 aa, Artificial Sequence
  Synthetic
REVEELVKEVRRRVREVHERNRRVLEDSERLVREVHKRNEEALRRSEELIKRVEDMRRRG

SEQ ID NO: 22976 - protein, 55 aa, Artificial Sequence
  Synthetic
ERAEREIRRLLEEVKKSVEDLTRKARKLSRDLERSVREVEERARDLSRRLREKTR

SEQ ID NO: 22977 - protein, 60 aa, Artificial Sequence
  Synthetic
SEVEKLVKDVEDLAREVHKRNKELVDEVRDRVRRVEERNKRVVDEVREEVKKLIDLLRRG

SEQ ID NO: 22978 - protein, 55 aa, Artificial Sequence
  Synthetic
EEAKDRIRELLKRVEESVEKVKRDIERLIERSKESVRRLEERIKELLRELEEAAR

SEQ ID NO: 22979 - protein, 60 aa, Artificial Sequence
  Synthetic
SEVEDLVRKVKKLMEDSDRENKRLVDEVRERVEEVKKRNKEVVDEVRERVKRLEEMLRRG

SEQ ID NO: 22980 - protein, 55 aa, Artificial Sequence
  Synthetic
KDAAEAIKDLIRKSEKSVDEVRREIERLIKESEDSVKRVTDEIRKLLKRLRDTTT

SEQ ID NO: 22981 - protein, 60 aa, Artificial Sequence
  Synthetic
SELEEILKTVKKLVDDHKRLSEEILRRVRKLVEEHKRKSEEILKRVTDLAEDVKDKIRKD

SEQ ID NO: 22982 - protein, 54 aa, Artificial Sequence
  Synthetic
EVEKELDRLLKELERVSRESEKELRRLLKELEEASRESEERLRRLLRDVEEALK

SEQ ID NO: 22983 - protein, 57 aa, Artificial Sequence
  Synthetic
DEIETVKEELKKLLERLEESSRKVERDLEDLLRRSEESTREVEKRLKELLEDVRRKL

SEQ ID NO: 22984 - protein, 56 aa, Artificial Sequence
  Synthetic
VKEVLDRVRELARTHHELNRELLREAEESSREHHRLNEELVDRVRKLVKEVEDRAR

SEQ ID NO: 22985 - protein, 57 aa, Artificial Sequence
  Synthetic
SEIERVKKALRKLLEDSRKSSEDLARELKRLLEESRKSTEKVERDLTDLLREIEEKL

SEQ ID NO: 22986 - protein, 56 aa, Artificial Sequence
  Synthetic
LDTILERVERSSREHHKLNERLLETLRRSSEEHHKRNEELVRRVERLLEEVERRRK

SEQ ID NO: 22987 - protein, 57 aa, Artificial Sequence
  Synthetic
SKIERVKEEIRRLLDTLKKSSETVIREIEKILKESRESSKKVEDDLRRLVREVEKKV

SEQ ID NO: 22988 - protein, 56 aa, Artificial Sequence
  Synthetic
VDKVLRDLEDLVRRHHERNKELLDRVRKSSEEHNRTNEELLKEVERLARKVIKDTT

SEQ ID NO: 22989 - protein, 57 aa, Artificial Sequence
  Synthetic
DEIEEVKRRARELLREATESSKEVAKALDELLERDRDSSRRVKEDLKRLLEEVRRKL

SEQ ID NO: 22990 - protein, 56 aa, Artificial Sequence
  Synthetic
LEKVLRDVEKLMREHHELNRELLKRVEDSSRTSHELNKRLVDTVRKLVTDAAEKAK

SEQ ID NO: 22991 - protein, 57 aa, Artificial Sequence
  Synthetic
SEIEEVDERIKALLKRSTESSKRVEDEARRLMKEDKDSSKEVEDRLRDLLRKVREKL

SEQ ID NO: 22992 - protein, 56 aa, Artificial Sequence
  Synthetic
LKKVLDDLKRSSEEHHRLNEELLKRAEDSSRTSHRLNRKLVEEVRRLVEKVLEEVR

SEQ ID NO: 22993 - protein, 57 aa, Artificial Sequence
  Synthetic
DEIEEVKKTLKKLVEELEESTRRVEEELKKLLKESEDSTRRVEDELRRLLEEVERKL

SEQ ID NO: 22994 - protein, 56 aa, Artificial Sequence
  Synthetic
LDEVLKDVERLVKEHEDLNKELLKKVEKSSRDHHELNKELVRRVEELVREAIKKTT

SEQ ID NO: 22995 - protein, 57 aa, Artificial Sequence
  Synthetic
DEVEKVKEEIRRLLKRLEDSTRDVERRLEELLRESTESSKEVEERLKRLLDEVRKKL

SEQ ID NO: 22996 - protein, 56 aa, Artificial Sequence
  Synthetic
VKKVLEELRELVRKHEELNRKLLEEVRESSERHKKLNKELVDEVKRLAEKITEEAR

SEQ ID NO: 22997 - protein, 57 aa, Artificial Sequence
  Synthetic
KEIEDVKRALEKLLEDDKRSTEELKDRLARLLEDSKRSSDKVIEDLDRLLKEVRDKL

SEQ ID NO: 22998 - protein, 56 aa, Artificial Sequence
  Synthetic
LDEILKRVEDSSRESHKKNEELLRRVRRSSEEHKRLNEELLREVEELVKEIVKEAK

SEQ ID NO: 22999 - protein, 57 aa, Artificial Sequence
  Synthetic
SKIEEVKKALRRLLEDLKRSTDRVKEEAKKLLDESRKSSEEVKRELERLLEEVTRKL

SEQ ID NO: 23000 - protein, 56 aa, Artificial Sequence
  Synthetic
ADKMLRDIERLVEEHKRLNEKLLREVRESSKRHNEKNEELVKTVKKLVEDAEERAK

SEQ ID NO: 23001 - protein, 57 aa, Artificial Sequence
  Synthetic
SEIETVKKELERLLDESRRSTETVEREVEDILRKSTESSEEVKDRLDKLLKEVRDKL

SEQ ID NO: 23002 - protein, 56 aa, Artificial Sequence
  Synthetic
LREVLERVRKSSEDHKELNKELLERLRRSSKEHNDKNKRLVDEVRRLVEEVIRRAT

SEQ ID NO: 23003 - protein, 57 aa, Artificial Sequence
  Synthetic
REIEEVKERLKKLLKDVTDSTDKVRKDLEKLLEDDRRSSRKVEEDLRRLLKDVRDKL

SEQ ID NO: 23004 - protein, 56 aa, Artificial Sequence
  Synthetic
LEKVLREAEKLAREHERTNEKLLKDVEKSSRDSHKRNKEIVDRVKKLAEDIIRKTK

SEQ ID NO: 23005 - protein, 57 aa, Artificial Sequence
  Synthetic
SEIERVKKRLEELLREVEESTRRLEERLKRLLEEAKRSSEEVEKELRRLLEEVRRRL

SEQ ID NO: 23006 - protein, 56 aa, Artificial Sequence
  Synthetic
LDDVLRRVEELAKRAHDENERLIREVEELVRRHNKRNKELVDEVKRLVEKVIEEER

SEQ ID NO: 23007 - protein, 57 aa, Artificial Sequence
  Synthetic
DEIERVKEELERLAKEDKDSTDTVKRELERLLEESKRSSDKLREDVERLLREVRERL

SEQ ID NO: 23008 - protein, 56 aa, Artificial Sequence
  Synthetic
LKRILEEVKRSSEESHKLNEELLDEVRKSSEEHNKLNEKLLRDVERLVRKVLTETK

SEQ ID NO: 23009 - protein, 60 aa, Artificial Sequence
  Synthetic
DELDKLLRDAEEVVRRVKEENKRLVKRDEEVVRRIHELNRKLLEDIRKVVEDVKEEIKEG

SEQ ID NO: 23010 - protein, 62 aa, Artificial Sequence
  Synthetic
EDAKRKVKRVKDELKRLVEEVEEVSRRSEERSRKTLEDVRDSSRRLEEELRKLVKEVEEAVR

SEQ ID NO: 23011 - protein, 60 aa, Artificial Sequence
  Synthetic
DELEKLLEDIRDVVRRIKETLEKLVKEDRDVVEKVKEDNKRLLKEMEDVVRKVKEEIRSG

SEQ ID NO: 23012 - protein, 62 aa, Artificial Sequence
  Synthetic
ERLERRAEEMEERLRRLVEEVREVVERVKEESDRTVEEVRRSSDRVEKEVERLVREVEDKVR

SEQ ID NO: 23013 - protein, 60 aa, Artificial Sequence
  Synthetic
EELERLMRRSEESLKRSEDTVRELIREAREILKRIKEELKRLLEEAERILEEVKKTVRDL

SEQ ID NO: 23014 - protein, 55 aa, Artificial Sequence
  Synthetic
KDLIKTARDTLRESERVSKELEERLKKIVEEVERLVEEVKKELERIVKDAERDVK

SEQ ID NO: 23015 - protein, 60 aa, Artificial Sequence
  Synthetic
DELRKLARDAEEILKRSEEEVRKLKKRSDDSLRRSREEVKKLEDEIREIVDRIKKRVEER

SEQ ID NO: 23016 - protein, 55 aa, Artificial Sequence
  Synthetic
EELKRTLEEIVERSKRVSDRLRERLKRTLDDSRRISDDLRRRLKKLVDDIRREVK

SEQ ID NO: 23017 - protein, 61 aa, Artificial Sequence
  Synthetic
KEIEDVKEELKKVLEEDRDSLRKVEKEHRRLAEEVKRKVRELEESLKRIVEEVERIAREAK

SEQ ID NO: 23018 - protein, 56 aa, Artificial Sequence
  Synthetic
LETVIREVRRILEESKRLNDKSREEVRKLVEELKDIVRRIEETVRRLLEEAKERLR

SEQ ID NO: 23019 - protein, 60 aa, Artificial Sequence
  Synthetic
DSVDRLRRRVDEVLKTVEDALRRNKKDAEDLLRRIEEVLERLERRSEKLLKEIDEVLKRV

SEQ ID NO: 23020 - protein, 59 aa, Artificial Sequence
  Synthetic
DEILTRAVEEIDELLRKLKRELDESTKESRKRVEELEKRLRDNTKRVKKDVDDLKRRVS

SEQ ID NO: 23021 - protein, 57 aa, Artificial Sequence
  Synthetic
SSIERLEEESRKNIKELEDSVKELKEEVDRLVEELERSVRELAKIVEDVVRELKKRA

SEQ ID NO: 23022 - protein, 59 aa, Artificial Sequence
  Synthetic
DEEVKRVLEESHRLVREVHERNKRVAERVRDLVRRVHEENERVAEEIRDLVRRVEEEVR

SEQ ID NO: 23023 - protein, 60 aa, Artificial Sequence
  Synthetic
SEIEDVVKKLRDLSERNVRDIDRLVKEIDELLKRDKEEIKRVVDDIKRRVREIKKIIEED

SEQ ID NO: 23024 - protein, 59 aa, Artificial Sequence
  Synthetic
KEMLDRLRKVVDELVKENKKAVEDLKKRVEDVIRESKRVVEEARRVVDELKKELRDELK

SEQ ID NO: 23025 - protein, 60 aa, Artificial Sequence
  Synthetic
SEIEKLVEEAKRLVKEAEDRLRKLSKESEESVRRVVKTLKDLVRELERLVEEVRKIIERN

SEQ ID NO: 23026 - protein, 62 aa, Artificial Sequence
  Synthetic
DEMRKRVKELEEAVKELTKEIKEVVDRHRETVERSSRKVKTVLDDLRRVVEEILRRVEDAAR

SEQ ID NO: 23027 - protein, 60 aa, Artificial Sequence
  Synthetic
KKIEDLVEEIKRLSDENRRRVERLSEDSKRSLEENKKKLKELVERIKKLLEEVSDKIRKD

SEQ ID NO: 23028 - protein, 62 aa, Artificial Sequence
  Synthetic
EEAEERLRRAEDTVRRLVERNREVLEEHERTLRRSSEESKRALKEVERVVREVLKRVDEELQ

SEQ ID NO: 23029 - protein, 60 aa, Artificial Sequence
  Synthetic
DELEKLVRDLEKRVKEVKDELKRSSEESERSLDEVRKTLKKLVEEMRELLKEVKRIIERN

SEQ ID NO: 23030 - protein, 62 aa, Artificial Sequence
  Synthetic
EEARERLERLRKRVEELLREVEKALEDDEKTVRESSKRIKKVLKELEDTARELVKEVRETAR

SEQ ID NO: 23031 - protein, 60 aa, Artificial Sequence
  Synthetic
SELEKLVRDLERLSEDNKRRLKESSKESKESLDRVRETIKRLVEEAEELLKRVVDTIRRT

SEQ ID NO: 23032 - protein, 62 aa, Artificial Sequence
  Synthetic
EEARERLERLREKVEELARDNERALREDERTVRESSERLRKVLEEAKDRIDKLVKAVEDAAR

SEQ ID NO: 23033 - protein, 60 aa, Artificial Sequence
  Synthetic
SELEKLVEEAKRLSDKNEEDLRRSSRESRESLKENKERIERAVKRLADLVRDVKEKIKRT

SEQ ID NO: 23034 - protein, 62 aa, Artificial Sequence
  Synthetic
EEMKERLERLRDTLKKLKERNKEVLREDRETVTDSSRRSEEVVREAEERVERLLREVEEAAR

SEQ ID NO: 23035 - protein, 60 aa, Artificial Sequence
  Synthetic
DELEKLVRELEELVKRVKEELERSSKESEDSLRDVKKKIEDLERKLDKLLKEVTDEIRRN

SEQ ID NO: 23036 - protein, 62 aa, Artificial Sequence
  Synthetic
DEMRKRLEDLERKVRDLARRVEKALEEDERTVRESSKRIRELLKRLEDKVRKIEKDVDDARR

SEQ ID NO: 23037 - protein, 60 aa, Artificial Sequence
  Synthetic
SELERLVREVRELSDDNRRKLERSSRESERSAKEVERTLEKLVKELRELVERVKRDIERV

SEQ ID NO: 23038 - protein, 62 aa, Artificial Sequence
  Synthetic
EEMKERLKELEKEADDLRRENEELLDRDRRTVEESSKRVEKALRDLEREVRRILREVEETMR

SEQ ID NO: 23039 - protein, 60 aa, Artificial Sequence
  Synthetic
SKLERLVEELKRLSDENVKDLERSSRESEESLKRNKEEIERVVERLRELLEKVVRDIKDD

SEQ ID NO: 23040 - protein, 62 aa, Artificial Sequence
  Synthetic
EEAKERLDRLREAVEKLREDNKRALDRDRETVERSSKKSEDAVRRAEEDVRRLTETVRRAKK

SEQ ID NO: 23041 - protein, 60 aa, Artificial Sequence
  Synthetic
SEIEDLVRKLRELLRDVKKKLKESSKRSEDSLRRVKEEIDKLVEELKKLLDEVKKEIERT

SEQ ID NO: 23042 - protein, 62 aa, Artificial Sequence
  Synthetic
EEAEKKMRELEEEVKKLLEEVDRALKDDERTLRKSSKDIKKVLDDLRRTVKKLKEDVEETMR

SEQ ID NO: 23043 - protein, 60 aa, Artificial Sequence
  Synthetic
DEIERLVEELRKLSERNKRELDRSSEESRESLKRVKEELKKIVEELRRLLEEVKDRIRKD

SEQ ID NO: 23044 - protein, 62 aa, Artificial Sequence
  Synthetic
EEARERAKRLEKEVRDLAKENEKALEEDERTVRRSSEEIADLLRKVEKVVRELLEEVRRAAK

SEQ ID NO: 23045 - protein, 60 aa, Artificial Sequence
  Synthetic
SSLEDLVRRARELSDRNREKLKRSSDESRESLKRNEEEIRRLVEELRELLERVRDLIRKL

SEQ ID NO: 23046 - protein, 62 aa, Artificial Sequence
  Synthetic
EDAKRDLDRLRREVERLIRDNERLAEEDARTVEKSSRDSKKLVEDLEREVEKLRREVERDRK

SEQ ID NO: 23047 - protein, 60 aa, Artificial Sequence
  Synthetic
SSIEDLVRRLRELSKRNTEELKRSSEESEDSVREVEDRVRELVKRLRELLKRVEDLIRKI

SEQ ID NO: 23048 - protein, 62 aa, Artificial Sequence
  Synthetic
EEMEKRAKELEEEVRDLTRRNEDALRRDRDTVKRSTERVDKVLKDLEREVRDIKRRVDEATK

SEQ ID NO: 23049 - protein, 60 aa, Artificial Sequence
  Synthetic
RELDELVKELRKLVEEVKDELRKSSKTSKELVEEIKERLERLVRELKRLVDEVRKTIRRL

SEQ ID NO: 23050 - protein, 62 aa, Artificial Sequence
  Synthetic
EDARRKLEELKETVRELLREVEKALDEDRETVKRSSEEVEEMLKDLRRRVTELDERVEREAT

SEQ ID NO: 23051 - protein, 60 aa, Artificial Sequence
  Synthetic
DEIEKLVEDAERLSRENEKRVRKSSEESKKLVKEALDELKKLVEELEKTVRDVDREIERN

SEQ ID NO: 23052 - protein, 62 aa, Artificial Sequence
  Synthetic
EEAKKRMEDMERRVRELEKRNKKVLDEDRETVRKSSKDLEDAVRELEERVRRLAKKVKESAD

SEQ ID NO: 23053 - protein, 60 aa, Artificial Sequence
  Synthetic
RELEELVKRLRELSRENEERLRRSSDESRKLLERNKERVKKVVDDLRRLVEEVKKEIERD

SEQ ID NO: 23054 - protein, 62 aa, Artificial Sequence
  Synthetic
DDARRRLKELEEEVKRLAKRNEDLLREDERTVRESSRRSEDVVRRAEEMVRRLLEEVERARK

SEQ ID NO: 23055 - protein, 60 aa, Artificial Sequence
  Synthetic
SELEKLVDELRKLSDENRRRLEKSSRDIEKLLKEIRDRIEELKKEIEDLLKEVKERIERL

SEQ ID NO: 23056 - protein, 62 aa, Artificial Sequence
  Synthetic
EEAEELLRRLEKRVEELARENEEMLKRDEDTVEEVRKRVTDVLRELKRVVEEVRRKVEEEAK

SEQ ID NO: 23057 - protein, 60 aa, Artificial Sequence
  Synthetic
SKLEKLVKDAEELSRRNEEELRRSSDESRKLLEKNKRRVERLVEELRKLVKKVRDDIRRE

SEQ ID NO: 23058 - protein, 62 aa, Artificial Sequence
  Synthetic
REAEELLRRLEEMLRRLTKKNRELLRRDEETVRRSSKRSEEVVRRAEEEVERLVKDVEDTRT

SEQ ID NO: 23059 - protein, 57 aa, Artificial Sequence
  Synthetic
KDEERAKKVVEEIKKRVTEIVRRHHKTNEDLVRRVRESSEKHHRRNEELKERVTRKI

SEQ ID NO: 23060 - protein, 56 aa, Artificial Sequence
  Synthetic
IETLVRELEELLKRLEDEVRRLTKRSKEVIDRIHKLNEDLTRESERVLKEVEDRDR

SEQ ID NO: 23061 - protein, 57 aa, Artificial Sequence
  Synthetic
RETEEVKKELDKLVEEAERAVREHHKENDRLVKRLEEVIRRHEKSVRELVEKVRREV

SEQ ID NO: 23062 - protein, 56 aa, Artificial Sequence
  Synthetic
LEKIVRRARELVERLKERLKELTRRSEELVKDLERKIERLSRELARIVKEVLDRDK

SEQ ID NO: 23063 - protein, 57 aa, Artificial Sequence
  Synthetic
SREEEAKKRLEELLREVEKVVRDHHRENEKIREEVERVVEKHKKRNRELVEAVRKRI

SEQ ID NO: 23064 - protein, 56 aa, Artificial Sequence
  Synthetic
VREAVERLKEIVERVRRKVEKLTEDSRRVLEELKRRIEKLTRDSERVLKEIEDRTR

SEQ ID NO: 23065 - protein, 57 aa, Artificial Sequence
  Synthetic
SDKEEVKKEIKKLKEDIKRAVDEHRKVNKRILEEAEKSSREHEKENRDIVRRVREEV

SEQ ID NO: 23066 - protein, 56 aa, Artificial Sequence
  Synthetic
IKEVVKELKKILEKLKRELEDLSRKSEDVLRRLHELNKRLTDDSRRVLDEVREDTK

SEQ ID NO: 23067 - protein, 59 aa, Artificial Sequence
  Synthetic
SEVDRLLKELEDVLKKVEDDIRRHIKRNEDILRESKKLADKLITEIEDMLRKVEEMIRN

SEQ ID NO: 23068 - protein, 59 aa, Artificial Sequence
  Synthetic
EEAVKRLEDTARRVEEEVRRLIRELEDTSRRVLEESRKISKELDERLRRVIEEVEKAAK

SEQ ID NO: 23069 - protein, 59 aa, Artificial Sequence
  Synthetic
SELEKLIKEIRDILKESEDAIKENLDRNEEALKRVAEEIKRLIDELRKMLEDVKRMIRD

SEQ ID NO: 23070 - protein, 59 aa, Artificial Sequence
  Synthetic
RRAVERVREELEKVIRDSRKLSRDLEEASRRVEEDVRRLIEELERRLKEVIKAVEDAAR

SEQ ID NO: 23071 - protein, 59 aa, Artificial Sequence
  Synthetic
DEVEKLAEELREILKRSEEMIRENLKRNRDLLRRSKEEVDKLKDELEEMLRRVRRVIED

SEQ ID NO: 23072 - protein, 59 aa, Artificial Sequence
  Synthetic
RELVKDLERKAREVIRTSEELSRRLAKTSEEVLEESERVVEELERRAERVEEEITKAAK

SEQ ID NO: 23073 - protein, 59 aa, Artificial Sequence
  Synthetic
SEVEDLLRKLEEILRRSKENVERNVRENREMLKKVEKTIRDLIRRAEKLLREVEEAIRN

SEQ ID NO: 23074 - protein, 59 aa, Artificial Sequence
  Synthetic
EDAVRRLEKELERVIKTSRDISERLERESRRVEEEVRKLIEELSRRLEEVRERVKEATR

SEQ ID NO: 23075 - protein, 59 aa, Artificial Sequence
  Synthetic
REVEEALKDLERILKESEDNVRRNIKKNEDLLRRVEERIRELLDEARRLLERVKEVKKD

SEQ ID NO: 23076 - protein, 59 aa, Artificial Sequence
  Synthetic
KDLVERLKEELERVTRDSRRVVDELRKRSEKVREDVRRLIEDLRRRLEKVIRDVEEDAR

SEQ ID NO: 23077 - protein, 59 aa, Artificial Sequence
  Synthetic
DETERIIRDLERVLEEIARLAKKNIDDSRRVLKELAEKLKRDSERAKKLLEDVEEIIRR

SEQ ID NO: 23078 - protein, 55 aa, Artificial Sequence
  Synthetic
EDVDRVVRKVLEDLRRLLEEVKKVNDDSEKEVRRLLEENERKNRRVEEEVKKLLK

SEQ ID NO: 23079 - protein, 60 aa, Artificial Sequence
  Synthetic
SELEDIIRRIEEVLKRNEELNRKNIKESRDLLEEIRRKAKEDSDRVKEVLRRLEDEVRRN

SEQ ID NO: 23080 - protein, 55 aa, Artificial Sequence
  Synthetic
EEVKRKVDKVVEDIKRVSEESTRANDESRRALEKVVKENEDTNREVVKRVRDAEK

SEQ ID NO: 23081 - protein, 59 aa, Artificial Sequence
  Synthetic
SELEEIIDRIRTVLERNRELNERNIRESKRLLDEIKKRVEDDNERSKDIVRRVETEVRE

SEQ ID NO: 23082 - protein, 55 aa, Artificial Sequence
  Synthetic
ERVDEVVEKVLDEMRKVSRTSEESNRKSEEEVRKVLKENNDMNRESVERLRRTEE

SEQ ID NO: 23083 - protein, 60 aa, Artificial Sequence
  Synthetic
DEVRRVIEELERLLEENRRHSKEDNERSKKINKENHDHSKESTDRAEKLLREVEKLIRET

SEQ ID NO: 23084 - protein, 58 aa, Artificial Sequence
  Synthetic
DRVRDVDRTVKRVVKESRRSTRENEKTNTDVVRSTDESLKEDKKEVDRVIEELDRAVR

SEQ ID NO: 23085 - protein, 60 aa, Artificial Sequence
  Synthetic
SEAEKVIEDAKRLLKENEDHSKEDNDRVRELLEEVKRHSEESTRRAEKILEEIRELVEKV

SEQ ID NO: 23086 - protein, 58 aa, Artificial Sequence
  Synthetic
EEVKRVEDEVRKLVKASRESTERNERTNREVAERLKKSLEEDRERVRKVVEDLRRAEK

SEQ ID NO: 23087 - protein, 57 aa, Artificial Sequence
  Synthetic
DELRKVLKESEDSLERLRRTLEESIKRSRDSLRENTELVKDSLRRSEESLERVEKSN

SEQ ID NO: 23088 - protein, 59 aa, Artificial Sequence
  Synthetic
KEMLKRLEDEIRRSIEELRKALRRVEEEHRKVIEASKDLVRRLEEAHKEVIDRLKEKLR

SEQ ID NO: 23089 - protein, 55 aa, Artificial Sequence
  Synthetic
DEIERVIEESRKSLDDLRRKAEESIRRSEESLREVEERLKRSIREAEESLKKVEN

SEQ ID NO: 23090 - protein, 59 aa, Artificial Sequence
  Synthetic
DEVVRELKKMIDKSERDLEELLDRVRRKHERVIEELKKLLKRVKDAHERVIRELEKTRK

SEQ ID NO: 23091 - protein, 59 aa, Artificial Sequence
  Synthetic
SEVEDLIRRVRKSNKESEDVLRESIERSEESNERSERTARRIIEEAERILEEMEESLKK

SEQ ID NO: 23092 - protein, 59 aa, Artificial Sequence
  Synthetic
EEVVRRLEEEVKRVAEHTRKLLKDVRKKHEESIRHSEEVLDRLEKKLREIMKRVTERTK

SEQ ID NO: 23093 - protein, 59 aa, Artificial Sequence
  Synthetic
KEVEDIIEDVKRSLEESKRMADKSITDSRRSNEESKRIVEEIKRKIDEILERIERKARK

SEQ ID NO: 23094 - protein, 59 aa, Artificial Sequence
  Synthetic
EKVVRELEKRVKEVVKTTEDVLREVERTHRESIKHSEDLVRRLEERLRRVAKEVERTRK

SEQ ID NO: 23095 - protein, 59 aa, Artificial Sequence
  Synthetic
SEVEKAIKEARDSLRESKRLLEESIKRSEDSLEESRRVVEEIKKRLEELLREVKESVDQ

SEQ ID NO: 23096 - protein, 59 aa, Artificial Sequence
  Synthetic
EKKVRDLERMVKRVMEETEKALEDVERRHEKSIRDTRRVLKELEDTVRKVLKEVDRERQ

SEQ ID NO: 23097 - protein, 59 aa, Artificial Sequence
  Synthetic
SKLEKVITEVRDSLRRSRKMAEDSIRRSEELLKELEDLLKKVRDTLRKILKDIEDLARK

SEQ ID NO: 23098 - protein, 59 aa, Artificial Sequence
  Synthetic
KELVDDVRREVEKVVEDTRRVLEEVERTHKESIDRLRKLVERVRREIEEIARRVKETRD

SEQ ID NO: 23099 - protein, 60 aa, Artificial Sequence
  Synthetic
SVVEKLKDEADKLVKRNEDLARRLEEVSKDTIDRLEDVLRKLREVLKRLRRRLEEVLKRV

SEQ ID NO: 23100 - protein, 59 aa, Artificial Sequence
  Synthetic
REKFEEVIKRLRDSSKRSEDKIRKVLKDSRDLLEDVRRKIEDVIRRMEKLIKEVEDRVR

SEQ ID NO: 23101 - protein, 60 aa, Artificial Sequence
  Synthetic
SVVEELERVMRELKKRNEELSRENHESVKEAEKRNKRLSEELEKVSRDVIKDLERVVEEV

SEQ ID NO: 23102 - protein, 59 aa, Artificial Sequence
  Synthetic
EREIRRIIEELKRLSDENEERIRRISEEIKDLSRRNEETVRRVIEENRKLLEDATRRTK

SEQ ID NO: 23103 - protein, 60 aa, Artificial Sequence
  Synthetic
SLREKLKEVIRRLEEENRRVSEENHRSVREVEEENRKVSDELRKVAEELKRRLEEVVRRV

SEQ ID NO: 23104 - protein, 59 aa, Artificial Sequence
  Synthetic
SREIEDIIRRVKKLSKENKETIERISREIRELSKRNEEEVRRVIRRLEELLEELERTAK

SEQ ID NO: 23105 - protein, 60 aa, Artificial Sequence
  Synthetic
RVIEKAEEVVDRLKKRNKEVLKENHDSVREVEKENRELLEKAEKVVRELEERLKEVVEEV

SEQ ID NO: 23106 - protein, 59 aa, Artificial Sequence
  Synthetic
EREIERIIKEAEELSKRNEEVIDEISKRIKELSERNRERVEKVIEEAKELVKRVTDKVK

SEQ ID NO: 23107 - protein, 60 aa, Artificial Sequence
  Synthetic
KDEEKAEDVVRRLTEEVRRVHEKTRDVVRRVTERSNDVSRRSKEEVRELLERADDLARKG

SEQ ID NO: 23108 - protein, 56 aa, Artificial Sequence
  Synthetic
VEDLIRELKRLVDELRERSEDLIRKAERVLERLEEESRRLLKELRDLLEDVTRKAE

SEQ ID NO: 23109 - protein, 60 aa, Artificial Sequence
  Synthetic
SETEKAREVVRELEKRNDEVHKETRDVVRRLEETSDEVSKDSERKVDRLREEVKKVRDDG

SEQ ID NO: 23110 - protein, 56 aa, Artificial Sequence
  Synthetic
VEELIRRMEKLTEDNERRSRKLIEELKRLLEDLREKSERLIRELERLVKELRDRAE

SEQ ID NO: 23111 - protein, 60 aa, Artificial Sequence
  Synthetic
SEKEKAREVVKKLKKRVDEAHKKTKDVVEELRKRNRDVHRTTREVVRDLLKKVKDVERRG

SEQ ID NO: 23112 - protein, 56 aa, Artificial Sequence
  Synthetic
VETLIERLRELIDELRRRSEKLIKELREVTKRNKERSDRLIKELEDLVKKLKDDAT

SEQ ID NO: 23113 - protein, 59 aa, Artificial Sequence
  Synthetic
DEVEKLIEDLKRIVERDEREIRELIKELDDHVRKDEKIARDLERRLKEILDEVRKMVTD

SEQ ID NO: 23114 - protein, 59 aa, Artificial Sequence
  Synthetic
KELLEKVKRVLEEVRRRSRETLERLREVLERSIRDSERTLEKVREMLERVRKEIEKLRK

SEQ ID NO: 23115 - protein, 59 aa, Artificial Sequence
  Synthetic
SEVEELDKRLRDHVRRDEEIVERLIRELKRHVERDREEARRLIEELRRLLEEVKRMMED

SEQ ID NO: 23116 - protein, 59 aa, Artificial Sequence
  Synthetic
RKLVRDVEKSLEESIRRSEETLKTVKDVLDKSKEDSKRTVEDVERVLREAEKEAKRATD

SEQ ID NO: 23117 - protein, 59 aa, Artificial Sequence
  Synthetic
SEAEKLIKELEDHVKRVEDRARELIDELRKHVEEDERRARKLIEELRRLLKEVKRMVDD

SEQ ID NO: 23118 - protein, 59 aa, Artificial Sequence
  Synthetic
EDLVRRVRKVLRRSEEDVRRLIEEVERVLKRSEEESRRTIREVEEVLKEVERAVEELAR

SEQ ID NO: 23119 - protein, 60 aa, Artificial Sequence
  Synthetic
SLEDRVREVVERSERDLRRSTDEIRRVVEEAEKALRRLVREVEEVVREVKERLERVVREG

SEQ ID NO: 23120 - protein, 59 aa, Artificial Sequence
  Synthetic
EDTVRKVIEDSDRSLEENKRLVKKVIDEIKERLKEMKKRAEEIIERLKKLLEEVEERAR

SEQ ID NO: 23121 - protein, 60 aa, Artificial Sequence
  Synthetic
DLTKRVEEVVRRSRERLERSTRDIKRKAEEVKERLKKSSKEVEKVIREVETELERLRREG

SEQ ID NO: 23122 - protein, 59 aa, Artificial Sequence
  Synthetic
EKKVEEVLRRSEKSVRDNKKRVEEVAETLKKILTDNRRLVKRVKEELDKLIRDVEERAR

SEQ ID NO: 23123 - protein, 57 aa, Artificial Sequence
  Synthetic
SEKEDVERVVERVKREADELLKENHKSVKDVDERVKETVERNHRSVRKAEEDVKRVE

SEQ ID NO: 23124 - protein, 56 aa, Artificial Sequence
  Synthetic
VREVAKELEDIVRRIKELVERSNRELKKIVEDNERVVEESDRRIKEILERITEASR

SEQ ID NO: 23125 - protein, 57 aa, Artificial Sequence
  Synthetic
SEKETVEEVVDKVRRDLDKSLEDNHKSVEEVRRRVEKTLRENHESVERARKRARDLE

SEQ ID NO: 23126 - protein, 56 aa, Artificial Sequence
  Synthetic
VREVVERAKRILEDNKKKIDESNERLERIVRENKEMVERSDRRIEEIVERIERETR

SEQ ID NO: 23127 - protein, 57 aa, Artificial Sequence
  Synthetic
DEKEEVEKRAEEVRKKVDKLLKENHESVEDARRRVDKTLRENHESVEEVKRRVDEVR

SEQ ID NO: 23128 - protein, 56 aa, Artificial Sequence
  Synthetic
AEDVMEELDRLVEDLRRKVEDSNRKIKRIVDENKREVEKSNRKLRELLKELEDRAR

SEQ ID NO: 23129 - protein, 57 aa, Artificial Sequence
  Synthetic
SKKEDAERVVREVTREVRRLLKENHDSVREVLKRVDETVERNSRSVKEVLRKVREVE

SEQ ID NO: 23130 - protein, 56 aa, Artificial Sequence
  Synthetic
LKEVVDRARDLIRDLTRKVKESNERLEEIVERNEREVRKSDEDLKRLADDLERKAT

SEQ ID NO: 23131 - protein, 57 aa, Artificial Sequence
  Synthetic
REKEEVERVVEDVRRRLDESLERNHKSVRDALREVDRTVEENSRSVEKVRKRLKEVE

SEQ ID NO: 23132 - protein, 56 aa, Artificial Sequence
  Synthetic
VREVKKELEKIVRDNERVVEDSNDKIRRIVTKNTEDVKRSDETLERIVEEIERRAR

SEQ ID NO: 23133 - protein, 57 aa, Artificial Sequence
  Synthetic
KEKEDVERKVEDVKRDVDRVLEENHRSLKEAEERSNKLSDTSRRVAKRVVDDVRRLK

SEQ ID NO: 23134 - protein, 56 aa, Artificial Sequence
  Synthetic
VKEVVDRLEKIVRDIRKEIERSNRDVERLVRTLEEVSKRIIDTLERIIDKIREDTK

SEQ ID NO: 23135 - protein, 59 aa, Artificial Sequence
  Synthetic
SEAEELIEELERIAEEDRKLVEDSIRKLRKILDEDRKIMKRLAEELDRILEDVKRKVDK

SEQ ID NO: 23136 - protein, 55 aa, Artificial Sequence
  Synthetic
KELEEVVRKVKRESDRTLEKSKKVVDEVRRRSEETLEKLRRVVERVRKRVDEASK

SEQ ID NO: 23137 - protein, 60 aa, Artificial Sequence
  Synthetic
DRADELRERLKEIMERDRRIMKELEDELRELVERDERIIRELERRLEEIVKDVERKAKSG

SEQ ID NO: 23138 - protein, 55 aa, Artificial Sequence
  Synthetic
DELRRVVEEVEKDSERTLKELRRVVKEVEERVEKTLRDLEEVLERVKERVKRLKD

SEQ ID NO: 23139 - protein, 59 aa, Artificial Sequence
  Synthetic
KEAEDLMREVEELVRRDEEIIKRLADELEEIVDDNRRKVEDLVRRLEEILRRVEESMRK

SEQ ID NO: 23140 - protein, 55 aa, Artificial Sequence
  Synthetic
KELREVIERARKRVEETLRELERKLEEVRKTSEDLLRRLEEVVKRVKEEVEKLEK

SEQ ID NO: 23141 - protein, 59 aa, Artificial Sequence
  Synthetic
SEMDELRKELEDLARDDKRRVEESIRRLEKIAEDNERLARESIKRLRRLVTELEKLARK

SEQ ID NO: 23142 - protein, 55 aa, Artificial Sequence
  Synthetic
KELKEVVDRVREIVKKTLEESREVVKKVREDSKRLLEESKRVVEEVKKRVEELKK

SEQ ID NO: 23143 - protein, 59 aa, Artificial Sequence
  Synthetic
DEVEEVKEELKRTSRDDERKVEEIRKRLEESTRRLRELAEELKDELRKSSRDLERLRRE

SEQ ID NO: 23144 - protein, 55 aa, Artificial Sequence
  Synthetic
REVERALERSLKRSDETVKEVEELLRRSLEDSKKLLEEVREALERSKKRSDELRR

SEQ ID NO: 23145 - protein, 59 aa, Artificial Sequence
  Synthetic
KEVEDVKEELRRSSKKLRELAERLKKLLEDILDEDRKLAEEIKKRLEDSSRKIEELKRR

SEQ ID NO: 23146 - protein, 55 aa, Artificial Sequence
  Synthetic
DEVERMLKESDKESKRLLEEVDRMLKEVIKASKKSLDDVDRVLRRSERESEKRRK

SEQ ID NO: 23147 - protein, 59 aa, Artificial Sequence
  Synthetic
SEVEKVKEELRESSRALRKLVEKIRRILRETSERDRDTVREIADRLRKSSRRVEELKRN

SEQ ID NO: 23148 - protein, 55 aa, Artificial Sequence
  Synthetic
DEVRRVLEESERRSKKLLDEVEELLRRSERTSRESLKEVKERLRKSLEESERRAR

SEQ ID NO: 23149 - protein, 60 aa, Artificial Sequence
  Synthetic
SLVERLKKVVEDAERELRRLTKETEDVLREAEETIKRLSERLKKANEDTERKIRRLAKEN

SEQ ID NO: 23150 - protein, 59 aa, Artificial Sequence
  Synthetic
EKKIDDAIKRIRDLIERVEEINKEVVDRIKELIERVEEINETVIRDSERLIKEVEDEVR

SEQ ID NO: 23151 - protein, 60 aa, Artificial Sequence
  Synthetic
SLEEDLRRVLEEVKRELKELSKRSKEVNRKTEETARRLSEKSEKVNRETKKRVEDLMREN

SEQ ID NO: 23152 - protein, 59 aa, Artificial Sequence
  Synthetic
EKAIRDAIRRLKELVERVKRTNEEVVKESEELIERVRERNDDAVRKSRRLIERLTEKVK

SEQ ID NO: 23153 - protein, 60 aa, Artificial Sequence
  Synthetic
SLKETLEEVLKEVKRRIEDLSRRLEEVLRRAREELKRLSDDSRRVVEEAEERVRRLMEEN

SEQ ID NO: 23154 - protein, 59 aa, Artificial Sequence
  Synthetic
KEEIKRVIDELRRLIEEVEKRNREVVEEIKRLIKEVADDNRRALERIRRLIRKLEEEVK

SEQ ID NO: 23155 - protein, 60 aa, Artificial Sequence
  Synthetic
SLTERLREVLKKVEDTLRKLSERLRDVLRKAEKTIEEISRRSEEANRETKERAERLMEEN

SEQ ID NO: 23156 - protein, 59 aa, Artificial Sequence
  Synthetic
KDRIEDVIRELDRLLEEVRRINEEVLRRIEELIKRVKEENDRVMETSRRLIETVKEEVK

SEQ ID NO: 23157 - protein, 60 aa, Artificial Sequence
  Synthetic
DKVRKILKEMRDLVRRNKEEIDRSIRKIEELIERNKREIDKSIEELKRLLDEVRKIVKDE

SEQ ID NO: 23158 - protein, 58 aa, Artificial Sequence
  Synthetic
EMVRDVARVVKEVHDDNRRLTEKSERVVREAHRRNEEIVKASEEAVREAKRRLEELRR

SEQ ID NO: 23159 - protein, 60 aa, Artificial Sequence
  Synthetic
DKVREILKRLEDLVRTNKERIDESIEELERLADENRRRIKKSIDDLRRLIEEVERIVKDR

SEQ ID NO: 23160 - protein, 58 aa, Artificial Sequence
  Synthetic
EVVRDVERVLEEVDRANRDLVRRSKEVVDKVHETNKKLVEESKEAVDRVTELLERARK

SEQ ID NO: 23161 - protein, 59 aa, Artificial Sequence
  Synthetic
DEVEELVKKLEKVLREIEEMSERLSDENRKVLEKIKEDSKRLNEELERVLRRIREASRD

SEQ ID NO: 23162 - protein, 59 aa, Artificial Sequence
  Synthetic
SELLERLREVLEDVKRKLDEIHRRNEESLERLEREVKRLNEDNRRSLKTVDDRLRETKR

SEQ ID NO: 23163 - protein, 60 aa, Artificial Sequence
  Synthetic
SEKEKLDAVLREVEEAAKKNIDKNRRSLEEVAEVVRELVKENRKSLEEVKEMIERIIREI

SEQ ID NO: 23164 - protein, 56 aa, Artificial Sequence
  Synthetic
VEKIVEDLKRVLEESHKLSEDVDRLIKRVVEEAKKLSRDVNEDVKRVVKEVKDEAD

SEQ ID NO: 23165 - protein, 60 aa, Artificial Sequence
  Synthetic
SEKEKLDDVLRKVKDTLAENIKNNKESLDRVREEIERNIRRNEESLDRARRTVEKIIEEI

SEQ ID NO: 23166 - protein, 56 aa, Artificial Sequence
  Synthetic
VEKLVEELRRLLKESHELSREVNDRLRRALEESHELSKEVNETLRKLLEDIRREAK

SEQ ID NO: 23167 - protein, 60 aa, Artificial Sequence
  Synthetic
KDEERLKKVIDEVRKRVEENIRTNEDSLRKAEETLKRNIRKNEKSLEDARREIEELIREI

SEQ ID NO: 23168 - protein, 56 aa, Artificial Sequence
  Synthetic
VEKLIKKLRDLLEESHRLSEEVNRTLKRALDESHERSKEVDKRIEEMVERVRRKVK

SEQ ID NO: 23169 - protein, 60 aa, Artificial Sequence
  Synthetic
SEREKLEKVLEEARREIERLAEENRRSLDRARKEVKRLIDNNRKSLDDVRKRVDKLVKDI

SEQ ID NO: 23170 - protein, 56 aa, Artificial Sequence
  Synthetic
VEKLVEELKKVLDDVRKESERVNRTLKKLLEDIERLSREVNKRIKEMVRKATEDVR

SEQ ID NO: 23171 - protein, 60 aa, Artificial Sequence
  Synthetic
SEKEELDKVLKEAEDKIEENIRDNERSLRDVERAVRRIIENNRESLEELDKAVKEIVRRI

SEQ ID NO: 23172 - protein, 57 aa, Artificial Sequence
  Synthetic
DVKTLVEELRRALEESHKLSEDVNRALKKVLEEIADLSRKVNDKLRELLKRLEEEAR

SEQ ID NO: 23173 - protein, 60 aa, Artificial Sequence
  Synthetic
SKEEKLDKKLKEAERTIRENIKENRESLERARKTLEENIRNNEDSLRRVEEEVRRIIEEI

SEQ ID NO: 23174 - protein, 56 aa, Artificial Sequence
  Synthetic
VDDILRRIEEILRRSHRLSKEVNKRIKELLDRSHELSKRVNDELDKVLKEIRREAK

SEQ ID NO: 23175 - protein, 60 aa, Artificial Sequence
  Synthetic
DEDEELKKVLDRAKKRVDELVRNNEESLERVKRAVDRLIEKNERSLERAEDELRKLVKEI

SEQ ID NO: 23176 - protein, 56 aa, Artificial Sequence
  Synthetic
VEKLKKELDDMLRKLEELSRRVNRTLEELLRRIEELSREVDERIKKVLKEIKDRVK

SEQ ID NO: 23177 - protein, 60 aa, Artificial Sequence
  Synthetic
SEKEELDDVLRRVEEKVRRNVRKNEDSLKKVEDEVRRNIRNNEKSLEDAERDVRKLAKDV

SEQ ID NO: 23178 - protein, 56 aa, Artificial Sequence
  Synthetic
VKKLLKELEDLARESHKLSRDVDRKLEDALRRSHRLSREVNRKIEEMVRKLREDTR

SEQ ID NO: 23179 - protein, 60 aa, Artificial Sequence
  Synthetic
KEEERVTDALRRVRETAKKNIEYNRRSVERVERTLKELVKNNTRSLERVRKAVKELVERI

SEQ ID NO: 23180 - protein, 56 aa, Artificial Sequence
  Synthetic
VDKLIERLERVLEKSHRDLRRNSKDNKRILDEIKKESEEVNRRLEEVLRKIKEDVE

SEQ ID NO: 23181 - protein, 61 aa, Artificial Sequence
  Synthetic
DKVRELEKTLRDLLRENHRISEDLNKKLKDMARRNKKHSEDVIEKIKRLLDRLREIVKRDG

SEQ ID NO: 23182 - protein, 59 aa, Artificial Sequence
  Synthetic
DELVRRVREVLREVEERLRDNIKDNRRSLDDHRRVIEETRRESKRAVERAEDEVKKLED

SEQ ID NO: 23183 - protein, 61 aa, Artificial Sequence
  Synthetic
SKVEDLIRRLKTLLDDLRRISREVDEKIKEILKEVERHSKEVIDRIKDILRRVEEIVRRKG

SEQ ID NO: 23184 - protein, 59 aa, Artificial Sequence
  Synthetic
KRLVERVEKVAREVEEAVRKLIEKNKESVERAEETARRLIERSKRAVDEARRKIEELRR

SEQ ID NO: 23185 - protein, 61 aa, Artificial Sequence
  Synthetic
SKVEELIERIERLLEEVRRISDKVDEDLERLIRENEKHSKKIIKELEKLLKELEDIVRREG

SEQ ID NO: 23186 - protein, 59 aa, Artificial Sequence
  Synthetic
KRLVERLRKVVEDAEREIRRLIEKNKRSLERHKRELERTIKESRDVLKKVEDRVRELAR

SEQ ID NO: 23187 - protein, 61 aa, Artificial Sequence
  Synthetic
SKVEDLERRIRKILREVEEISERVNRALKRLLDENRKHSEKIIRELEELLRRLEEEVRTKG

SEQ ID NO: 23188 - protein, 59 aa, Artificial Sequence
  Synthetic
KSLVDRVRKAVEEAEERIRRLIENNERSLRRHEEAIKKTIEESDKVLEDVRRRAEELLK

SEQ ID NO: 23189 - protein, 61 aa, Artificial Sequence
  Synthetic
SKVERLIERLKELLDENHKISERVNKELERLARENDKHSKDLIRDIERILREVEEIVRRDG

SEQ ID NO: 23190 - protein, 59 aa, Artificial Sequence
  Synthetic
RRLVEEVRRVLREVREAAKENIRNNRESLKRHKDALRKTIEDSARVVKRAEERIRELER

SEQ ID NO: 23191 - protein, 61 aa, Artificial Sequence
  Synthetic
SKVDELVERIERLLRELTKHSKEIIDRLKKLLEDNERINRDVIRRIEEILKEVKRIVERDG

SEQ ID NO: 23192 - protein, 59 aa, Artificial Sequence
  Synthetic
EELVRKVREVVDRARERVEELIRRTEDVLKKHREELKKLIEESRRVLEEAKKTADELKK

SEQ ID NO: 23193 - protein, 61 aa, Artificial Sequence
  Synthetic
DEVRKLKEDLRRLLKENKEKVEKVIRENEKLLRENKKMVEDAERDLRRLLKELEDLVRKRG

SEQ ID NO: 23194 - protein, 59 aa, Artificial Sequence
  Synthetic
KELVDEVRRVARRVKEENKRLLDEVRKVSEEVERTNRELVRRVEEVVREVRERIDELLR

SEQ ID NO: 23195 - protein, 61 aa, Artificial Sequence
  Synthetic
SEAEDLERRIEKLLEDNTRLVERVIEENEKLLRDNAEHSKEVEDRLRDLLRRLEEVVRKRG

SEQ ID NO: 23196 - protein, 59 aa, Artificial Sequence
  Synthetic
EELIKRVEEVVRKAKKTNEDLLREVEKVSREVKKANEDLLRRSKEVVDEVEKDIERLKR

SEQ ID NO: 23197 - protein, 61 aa, Artificial Sequence
  Synthetic
DDIERIIEKLKELLERNKRHTEEVIKELERLLRENERHSREVKKRLEELLKRLEDVVRREG

SEQ ID NO: 23198 - protein, 59 aa, Artificial Sequence
  Synthetic
EEVIRRIEEAVREVKEANKDLVRESRRVARRVEEENKRLVEESRRVVEKVEKRIRDLLR

SEQ ID NO: 23199 - protein, 61 aa, Artificial Sequence
  Synthetic
DEIDEARKELEEILRENREKVDEVRKRLEKLLRENEEVVKEIIRRLKELLKELERVMREEG

SEQ ID NO: 23200 - protein, 59 aa, Artificial Sequence
  Synthetic
EKLVREVRKDAERAERELRRSVEDIRRVVERVKRENERLLREVEKVVEEVKEELRKIET

SEQ ID NO: 23201 - protein, 61 aa, Artificial Sequence
  Synthetic
DEIERVIEELKKRLDENRRVLEEIIRRLEELAKRNKRHSEELEKRLREELDKVRKRLEETG

SEQ ID NO: 23202 - protein, 59 aa, Artificial Sequence
  Synthetic
RELIERMREVVEEVERALRKSLKDVEDVVREVEKKNKELLEKSKKVVEDVRRTLEKLRE

SEQ ID NO: 23203 - protein, 61 aa, Artificial Sequence
  Synthetic
SEVEEAIKTLKKLLDDNKRHTEEVIRRIEELLKRNEEHSRKVIEDLERLLRKLEKMVRDRG

SEQ ID NO: 23204 - protein, 59 aa, Artificial Sequence
  Synthetic
EEVVRRMEEAVRRAEETNKDLVRRSREVVRRANETNKKLLEDSKRVVERVEKRLEELLR

SEQ ID NO: 23205 - protein, 61 aa, Artificial Sequence
  Synthetic
SELEEIERELEELLRENKKLVDRVREELKKLLDELRKHSERVIREIERLLEELERVVRKRG

SEQ ID NO: 23206 - protein, 59 aa, Artificial Sequence
  Synthetic
EELIKRLTDVVRKVKEDNKRLVEEARRVVEEVKREIKRLLEESREVVRRAERRLEELRR

SEQ ID NO: 23207 - protein, 61 aa, Artificial Sequence
  Synthetic
SEIEDAERKLKKLLEDNTDMARRLIERLRKILEENKRHSERVKRELEEILKELEDLLRRKG

SEQ ID NO: 23208 - protein, 59 aa, Artificial Sequence
  Synthetic
EELVKRVEDVVRKVDEDNKRLVEEVRRVVEEVRKTLEDSLRESERVVREVKKRLEDLKR

SEQ ID NO: 23209 - protein, 60 aa, Artificial Sequence
  Synthetic
SEREKMEKVVREAKKDLDRSLKRVKEVAEEVKKELDRSLEEVKRVSEENKKEVDRIRKKG

SEQ ID NO: 23210 - protein, 56 aa, Artificial Sequence
  Synthetic
VDTLVRRLEKILEENRRIVKEIEDRLRKLLEDNKRVVDEIIKRNEDSVRDVERRAK

SEQ ID NO: 23211 - protein, 59 aa, Artificial Sequence
  Synthetic
SEREKVEEVVREAKERLDESVKRVEEVSRENKKEIDRLLEEVKKVIEEAKRRLEELRRR

SEQ ID NO: 23212 - protein, 56 aa, Artificial Sequence
  Synthetic
VDEVLKELRRILRDNERMVKEVIERNRKSVEDLERIARRIIEEIERLLKELTDRAR

SEQ ID NO: 23213 - protein, 60 aa, Artificial Sequence
  Synthetic
SEDEEVEEAADRHRRSVEDSSRDLKKVLDEDRRTVAESSRKLKEILREVEREVKRVEDDG

SEQ ID NO: 23214 - protein, 56 aa, Artificial Sequence
  Synthetic
VEELKKRLKELSDESRKSLERVKRKLEETSRRSEESLRRVKKDAERLVREIEKRAK

SEQ ID NO: 23215 - protein, 60 aa, Artificial Sequence
  Synthetic
SEDEKVKKVLDDVRRKAEDSSRRITEVLRRHEETVRRSSEKLKKLLDELREDADRVRRAG

SEQ ID NO: 23216 - protein, 56 aa, Artificial Sequence
  Synthetic
VKDLERKARDIVRKSEESLERVVRELERLSRDSERSLKKVKEDLERVVEEIRRRAD

SEQ ID NO: 23217 - protein, 59 aa, Artificial Sequence
  Synthetic
SEDEEVEKVLREDEESVKRSSDEIRKLLEDHERTVRESSDELKKALDEVRKRLDELKRR

SEQ ID NO: 23218 - protein, 56 aa, Artificial Sequence
  Synthetic
VEDLKREAERTSEESRRSLEEVRRRLEELSERSRESLKRVKDELKRVVEEIEERAR

SEQ ID NO: 23219 - protein, 60 aa, Artificial Sequence
  Synthetic
SEDEEVKRVLDELRKRLKESSDRLREVLKRDKRTLEKSSEDIDRALKKVERALTEVLKEG

SEQ ID NO: 23220 - protein, 56 aa, Artificial Sequence
  Synthetic
VKELLDTLRKLVEESEESLREVVERLDKTSEDSKESLRRVIETLDRLVKDIDEKAK

SEQ ID NO: 23221 - protein, 59 aa, Artificial Sequence
  Synthetic
SELEKLKKEIDDLSRDLDRILKELKKRVEELTRRSEKVLEDLRKTLEDIVKTLEDLARG

SEQ ID NO: 23222 - protein, 59 aa, Artificial Sequence
  Synthetic
SELVKRAADVVEKHRRSLERLLRTVTKIVKDHHERNEEIVDEVRKVVERAKERLEEIRK

SEQ ID NO: 23223 - protein, 59 aa, Artificial Sequence
  Synthetic
SEVDELRRRVKKLSDDSKRVLDELSRRLKELSERLAEIVKEVHRRNEELVDRLRRLKDK

SEQ ID NO: 23224 - protein, 59 aa, Artificial Sequence
  Synthetic
SELVEEVKRVVEKHHEDNKRIVEALAEMVKDHKRTIDELRRRLEESVKDAEKKLRDVSR

SEQ ID NO: 23225 - protein, 59 aa, Artificial Sequence
  Synthetic
SELEELERRLKELSDESRRVLRELLERLKELSKDLERILEDLKEKVKKIEKDLRELKKR

SEQ ID NO: 23226 - protein, 59 aa, Artificial Sequence
  Synthetic
SDLVREVARVVKEHHDENEDIVRRVKEAVDEHRETIERLRRAVERVVKEVERRLKEEAR

SEQ ID NO: 23227 - protein, 60 aa, Artificial Sequence
  Synthetic
SKDEELERVVKEVREVLDDVNREVTKVSDDVKKRLDELLEEVRRVSDEVRKRLDEVLRER

SEQ ID NO: 23228 - protein, 56 aa, Artificial Sequence
  Synthetic
VEEAKRRLEKLVRDIRRLTEEHKKRHEDLVREVEEIVKKLKDDHRRLVEDIERAIR

SEQ ID NO: 23229 - protein, 59 aa, Artificial Sequence
  Synthetic
SVLDELREKAKKNIKESEELLRRNEDHSRRDTERSKKLLEDLERRVKEVVREAERIKKK

SEQ ID NO: 23230 - protein, 59 aa, Artificial Sequence
  Synthetic
KDVVRDLERVVKEVEDSNRKVADDSRRSTEDNKRKNEKVERDARELLKEIEEIVRRLEK

SEQ ID NO: 23231 - protein, 59 aa, Artificial Sequence
  Synthetic
DSLERLREIVERIVREARRLLRENEEHSERDTREVERLLEEVERRLRRVVEEAEKIKKR

SEQ ID NO: 23232 - protein, 59 aa, Artificial Sequence
  Synthetic
EDVVREARRIVDELRKEVKEIVERSRKSTEDNERRNRKVIEDLKRLVKELEDRIREIKK

SEQ ID NO: 23233 - protein, 60 aa, Artificial Sequence
  Synthetic
DFEERLKEVLKDAERVVDENKKENKKVLDKAKKVVDENRDRNRRVLEEVEREIRRLIDEI

SEQ ID NO: 23234 - protein, 58 aa, Artificial Sequence
  Synthetic
KEVEEVLKEIKDILRESSKTSKDLVRRTEEILEESSRDSDRVAKESKKLLEEVKEEVR

SEQ ID NO: 23235 - protein, 60 aa, Artificial Sequence
  Synthetic
SFEEKLDKVVREVEDKIRRLVKRNRDAVKRVADEIRKLKDRNEEVVDRAREKIKRLIDEI

SEQ ID NO: 23236 - protein, 58 aa, Artificial Sequence
  Synthetic
KEVEEVLTRLKEKLKRVEESSEKVVRDSERLLEKIKKLSKDVEDESRKLLERVEREVR

SEQ ID NO: 23237 - protein, 60 aa, Artificial Sequence
  Synthetic
SEVERLLKELKELLEELKKKVDDVLKDLEELLKRLEDHTREVVKRSEDLLRELEEMKRRG

SEQ ID NO: 23238 - protein, 59 aa, Artificial Sequence
  Synthetic
EEVVRELRRVLEEVRRTAERLLEKLDTVLKKVEDKIRELLKESTRVNKDAKREIDRLRK

SEQ ID NO: 23239 - protein, 60 aa, Artificial Sequence
  Synthetic
SEVETILEDLRRLLEELKKHSDEVVKEIKDLLREIEKHTREVVKTSKKLLKELEELRKRG

SEQ ID NO: 23240 - protein, 59 aa, Artificial Sequence
  Synthetic
EELVRKIEKVLKEVRETIKKIAEDSDRVLEEAKEVAKRLKDESDRVNEEVRKRIEELKK

SEQ ID NO: 23241 - protein, 60 aa, Artificial Sequence
  Synthetic
SDVDRVLEEIRKLLEDLKRHSEKVSEENEDLLRKNTELNKRVSEDNERLLEELKRLRERG

SEQ ID NO: 23242 - protein, 59 aa, Artificial Sequence
  Synthetic
EELKKKLDEVLERAKRTIDRLLETSDRSLEKVERDLRRLNEELDRSLERAERTIRELAK

SEQ ID NO: 23243 - protein, 60 aa, Artificial Sequence
  Synthetic
SEVDEVLERIKRLLERLAEHSDKVVRDIEKLLDDNRKENERLLDKLRRELKRLEEMRRRG

SEQ ID NO: 23244 - protein, 59 aa, Artificial Sequence
  Synthetic
EELRRKLEKVLREAEKVIDELLKKTDEVLKRARETIEDLNRKLDKVLKEVRDKLDRLRD

SEQ ID NO: 23245 - protein, 60 aa, Artificial Sequence
  Synthetic
SSIEKVKREVDEVIKTSKKSSEDSEKLVRDVEERLRKLVKDVRDRVKRVIEEMERLVRER

SEQ ID NO: 23246 - protein, 58 aa, Artificial Sequence
  Synthetic
ELVERLKEVLKRLEEVSEESERRNREVVRRLEDTARKLTEELRRVLTELRDVLRRLEK

SEQ ID NO: 23247 - protein, 60 aa, Artificial Sequence
  Synthetic
KDEETLKRLLEKAKEVVDRLKDENEKVTRDNHESVKKAKDANKRSNEKSERVARDAIRRV

SEQ ID NO: 23248 - protein, 56 aa, Artificial Sequence
  Synthetic
VRELAKKVEKAIRELEELSRENREAVKRISDEIKRLSDENAKDSERIIKEIDDRVR

SEQ ID NO: 23249 - protein, 60 aa, Artificial Sequence
  Synthetic
SDDETVTKLLKEAEKVVRELTKRNKELLRKNHESVREAKKRNEDLSRKLEEVVRRLIEEI

SEQ ID NO: 23250 - protein, 56 aa, Artificial Sequence
  Synthetic
VKDLAKKIEDVIREMEELTRRNEKRIEEISDEIRRLSDTNRREIERIREELRRRAK

SEQ ID NO: 23251 - protein, 60 aa, Artificial Sequence
  Synthetic
REDERLEEIARKIKKVVDELVERNKKLTEDNHESVRRAEKRNRELSRELEEVAKRAIERI

SEQ ID NO: 23252 - protein, 56 aa, Artificial Sequence
  Synthetic
VEDIERKVEDIIRRLEDLSRRNEEKVRRISEEIKKLSKDNERTIKEIIKEIEERVK

SEQ ID NO: 23253 - protein, 60 aa, Artificial Sequence
  Synthetic
DELDRLREEIKALIKESRESLKRLEEESRRLAEELRKLIRELKERIERIIEEARRLAKEI

SEQ ID NO: 23254 - protein, 59 aa, Artificial Sequence
  Synthetic
DDVRKKVEDVLEEARRRITDDEDKTKKVHDESRRVVEEVRERVKRLLDKARTVVKEIEK

SEQ ID NO: 23255 - protein, 60 aa, Artificial Sequence
  Synthetic
SEVEDLERKIEELIERAKRLVEELEERSRRLIRELEELSKKNEEDIERLIKEAKKLAEDI

SEQ ID NO: 23256 - protein, 59 aa, Artificial Sequence
  Synthetic
EEMRRRVRELLKKAEEVVRRLEKDSDRVSKESEDMVRELLRRNEEALRKAEEVVREIKR

SEQ ID NO: 23257 - protein, 60 aa, Artificial Sequence
  Synthetic
KDIDELRKRIETLIREAKKLVDDVRKRSEDLIERLKKLSEDNARDIERLLREAEDLARKI

SEQ ID NO: 23258 - protein, 59 aa, Artificial Sequence
  Synthetic
REVKERVRRLLEKAADVVRRLIEESNRVSDDSRRVVKELLDRNKELLDRARKRVEEIRK

SEQ ID NO: 23259 - protein, 60 aa, Artificial Sequence
  Synthetic
DDIERLKREIERLLKEAEKISRDNEERSKELLDRLRKLSEDNKRKIDKLVEELKRLADKI

SEQ ID NO: 23260 - protein, 59 aa, Artificial Sequence
  Synthetic
EKVKRDAREALRKAKKKVDELKRKNDEVHRRSREEVKRLLEENRKLLEDLRRMVREITQ

SEQ ID NO: 23261 - protein, 57 aa, Artificial Sequence
  Synthetic
RKVEEVEKHSRESIKEIERLVEEVRKHSKDSIRRIEKLVEDVERHSRKVIEELERDK

SEQ ID NO: 23262 - protein, 59 aa, Artificial Sequence
  Synthetic
KDMVRRLEKILKEDKEVVKKAEEELRELLKEDREVVKRAEEELERLLKETEDVVRKVET

SEQ ID NO: 23263 - protein, 57 aa, Artificial Sequence
  Synthetic
SALEEVKRHSEESIKAIEELVRRVEKHSRESSKRNEELIREVEDHSRRVIEELKRKK

SEQ ID NO: 23264 - protein, 59 aa, Artificial Sequence
  Synthetic
EDVVRAAEKLLEEDRDAVRRAKEKLDELLKRDRDSSREAIRELERLLKETRDVLREVER

SEQ ID NO: 23265 - protein, 60 aa, Artificial Sequence
  Synthetic
SEIEKILKDVDKKLKDSSRESEESVKESRDLLRESSERSERSVRETRKRVDDLLRLVDER

SEQ ID NO: 23266 - protein, 59 aa, Artificial Sequence
  Synthetic
EDMKREIDKLVEKLKKVLRDNKRLHEKVIRELEEVVTRNEELHRRVIKEAKEVVDRVRK

SEQ ID NO: 23267 - protein, 60 aa, Artificial Sequence
  Synthetic
SEVEEVLRRIEELLREDKRHVEEVVREIRELLKRNKDMVDEVLKRIEDLLREIDEARKRG

SEQ ID NO: 23268 - protein, 59 aa, Artificial Sequence
  Synthetic
EEVIRKLDDILRKVKRVSEDNKRETDKVREEVAEVVKRSKDKLDKVRKDVKRVIERVRT

SEQ ID NO: 23269 - protein, 60 aa, Artificial Sequence
  Synthetic
DEVEKAAEDVERRLREDEDHARKVVKRIRELLEEDTRTVDKVLREIEKLLKDITDLRRRG

SEQ ID NO: 23270 - protein, 59 aa, Artificial Sequence
  Synthetic
KELTEKLDRLLERVEEVSKRNEDATRTVEKEVEEVVRRTKKKLDDILERVERVARELKR

SEQ ID NO: 23271 - protein, 60 aa, Artificial Sequence
  Synthetic
ELIKKARKDVEEVRERSERLVDELRKRNKKLADESRRLIDKLRKDVEKVLREIEDLLRKR

SEQ ID NO: 23272 - protein, 59 aa, Artificial Sequence
  Synthetic
KKLMEEVERLIKRLEDVNEKSERDVREINKESERVNEETEREVEDAIRKLREVLRRAKK

SEQ ID NO: 23273 - protein, 60 aa, Artificial Sequence
  Synthetic
KEVEDLERRVKEILDRMKRLIDENRKKIEKSIRELERLIDENRKEVERVKKELKDLKREG

SEQ ID NO: 23274 - protein, 59 aa, Artificial Sequence
  Synthetic
KEMEKKLEDIVRRVREVVRRAHETNERLVDRSRKAVEKAERTNRRLVEEIRKVAEEVRK

SEQ ID NO: 23275 - protein, 60 aa, Artificial Sequence
  Synthetic
DEIRELEERVRRILDELRRLVERNREVIERSIRELEKLLDRNRRKVEEILRRIDDLTRRG

SEQ ID NO: 23276 - protein, 59 aa, Artificial Sequence
  Synthetic
ERVKEAIKELVKDVDRVMREVDRANRELTKTSKKVLEDVDRTNRRLVKEVRDVVERARK

SEQ ID NO: 23277 - protein, 60 aa, Artificial Sequence
  Synthetic
KEVEDLERTVRTILKRMRELITRNEEEIRRSIEELKKLLKENKDTVRRILEEMKELKKEG

SEQ ID NO: 23278 - protein, 59 aa, Artificial Sequence
  Synthetic
EDAKRKLDELTKRVEKVVREADERNKRLTKRSKEVLDEVHRANEEALKEVEEVVRRVTK

SEQ ID NO: 23279 - protein, 60 aa, Artificial Sequence
  Synthetic
DEIEELRKKAEEIIRRMEDLVRRNTETIKRSIETLKKLIDENRRRVRKIIETMKELKRRG

SEQ ID NO: 23280 - protein, 59 aa, Artificial Sequence
  Synthetic
EEVKEAIERLVRRVEEVVRKVREENKRLNEESEEVVRRADRTNREILKRVRDAVREVRR

SEQ ID NO: 23281 - protein, 59 aa, Artificial Sequence
  Synthetic
DAEDTLRDITRKVRKVLEEHRETIERTIRKNRESLERVKRAIEELIERSRRALEEVTRS

SEQ ID NO: 23282 - protein, 59 aa, Artificial Sequence
  Synthetic
DEMLKRVEDIVKKLIEDLREMAKRNRDISKEVDDRLKKILDEVRKHSEEVIKRLKDEER

SEQ ID NO: 23283 - protein, 59 aa, Artificial Sequence
  Synthetic
SAEETLERLAREVRKVLEEHARKIKKTIDDSRRVLEEHRKTIKRTIDESRKVIKDVRDD

SEQ ID NO: 23284 - protein, 59 aa, Artificial Sequence
  Synthetic
EEVLRRVTEEVKELIERIERLLKENRKHSKKIIDRLRELLEENRRHSEELRKRLEDERR

SEQ ID NO: 23285 - protein, 56 aa, Artificial Sequence
  Synthetic
SSLDEIRRKVREAIERLERLLEENRRKVEEVKRRNERLLDRNREVVDEVIKRLEEM

SEQ ID NO: 23286 - protein, 59 aa, Artificial Sequence
  Synthetic
REVDEELKRLVEEVKKVVDDVRRENKRLLEEVERVSEEVKKTNEKLLERVKRVVEEAER

SEQ ID NO: 23287 - protein, 55 aa, Artificial Sequence
  Synthetic
SSLDTAREHTRDVIKKIDDILRRNEKLVDDVIRELERLLRENAEVVERVIDRLRR

SEQ ID NO: 23288 - protein, 59 aa, Artificial Sequence
  Synthetic
REVVEELKELRKRSEEVVDRAEKALRRSVRKAEKVVEEVERANKRLLERVKKVVDDMRR

SEQ ID NO: 23289 - protein, 61 aa, Artificial Sequence
  Synthetic
EVRERVKEVIERSEKSVRELERIVEELARRLRESVEDLERKIRELSKELRRVVEELVRTRG

SEQ ID NO: 23290 - protein, 59 aa, Artificial Sequence
  Synthetic
EEVVRRIEELLKEVHKENKRVADELKKLVEDLHDRNRRVKEEVKRRVDEVRRKAEEVAR

SEQ ID NO: 23291 - protein, 61 aa, Artificial Sequence
  Synthetic
EVDERIRRLVEESRKSVEDLARIVDELVERLRRSVRDLEEKSKRNKEELEKVLRDLARTRG

SEQ ID NO: 23292 - protein, 59 aa, Artificial Sequence
  Synthetic
EEVVERVERLIEKVHRDNRRVAEKLREDVRRVHEDNKDVARKSHKLVKEVRDTVREVRR

SEQ ID NO: 23293 - protein, 56 aa, Artificial Sequence
  Synthetic
DVLKEVEEDSRRNHERNRRVAEKVTDDSRRNVKRLEEVAEEIKDDSRKNKERLDKL

SEQ ID NO: 23294 - protein, 59 aa, Artificial Sequence
  Synthetic
KEIEKILRDVLKENEDSLRELKEILERLLEENRKAVEKLKRILEELLRRNDEMLKRVRT

SEQ ID NO: 23295 - protein, 56 aa, Artificial Sequence
  Synthetic
SVDEEVRRDSKKNKEDLDRVAEKVKRDSEENMRRLEEVARKVTEDVKRNKKTLEDL

SEQ ID NO: 23296 - protein, 59 aa, Artificial Sequence
  Synthetic
EEIRRILKELLERNERALEELKKRLRKVLEENKTVLEELRRRLEELLRRNKRMVDEARR

SEQ ID NO: 23297 - protein, 59 aa, Artificial Sequence
  Synthetic
DEVEKLVEDVARVNKKSLDEVRRLLEELEKVSRDHRREVERSLREAEKVLEDLKREAEK

SEQ ID NO: 23298 - protein, 55 aa, Artificial Sequence
  Synthetic
DEIRKVKKHNEDVLRKVRKILKDAERISKRALDENERILKEVEKRVRDVIRELER

SEQ ID NO: 23299 - protein, 59 aa, Artificial Sequence
  Synthetic
DEVDDVVRRLEEENRKSEERAKDTLRKAKKVLDELKKRVKESEDRVKEVLDDVEERVRR

SEQ ID NO: 23300 - protein, 55 aa, Artificial Sequence
  Synthetic
KRVRDALRHNEDVLRRNDEIVDELRKRVEDVLKKNEDDVRRVAEEVRRVIEELRK

SEQ ID NO: 23301 - protein, 59 aa, Artificial Sequence
  Synthetic
DRVEEVVKRAKDENRKSEEEVKKSLKDLEDLSREHEKRIRDLLKEVKEILDRIREEVEK

SEQ ID NO: 23302 - protein, 55 aa, Artificial Sequence
  Synthetic
DEIRKLERHNEEVLKKNETIARDLEKRSREVVKRLEDILRKVEREVEKALEEVRT

SEQ ID NO: 23303 - protein, 56 aa, Artificial Sequence
  Synthetic
SVEEELRKLKEEIDRVLEENKKIIDDIRKELDDVNRENKKIIDDIRKEIDDVLERV

SEQ ID NO: 23304 - protein, 59 aa, Artificial Sequence
  Synthetic
EKDLKKLLEEVRELLERSRRASEELLREVKRLLDESRKESKRLADDVRRLLEELERRTK

SEQ ID NO: 23305 - protein, 56 aa, Artificial Sequence
  Synthetic
SVEDIIRKIEKELDDVNRENEEIIRRIKKELDDVNRRNEKIARDSKKRVDDVLRKV

SEQ ID NO: 23306 - protein, 59 aa, Artificial Sequence
  Synthetic
EEVVKKIREEVRKLLEESKRRSDELAKEVRELLKRSEDKSRRNLEEVEKLLKEVEDRTR

SEQ ID NO: 23307 - protein, 60 aa, Artificial Sequence
  Synthetic
KDLEDVLDKVRKDLERSKKHSDDVVKTIRELLKESEKHSEELVKRVEKLLEELRRMTTRG

SEQ ID NO: 23308 - protein, 56 aa, Artificial Sequence
  Synthetic
ESILRELERRVKKVVEENDEITRRVEREVEKVDKKNKDITDTLRTRVKKAVDEARK

SEQ ID NO: 23309 - protein, 60 aa, Artificial Sequence
  Synthetic
SDIERLLREVEKVIRDSEEETRKLLEEVEKALKDSRDSSEDVKRKVDDILRKLRELRRRN

SEQ ID NO: 23310 - protein, 60 aa, Artificial Sequence
  Synthetic
MERIERLLREVRKRVEEAAKRNKDVIKEIEERVRTVHDENRRLLEEIAKRVRDVLEEVRT

SEQ ID NO: 23311 - protein, 57 aa, Artificial Sequence
  Synthetic
KVEEELEKEVRRALEESKRLLDRLTEHSKRVLDELRELLERVERDVRRVLEELKRER

SEQ ID NO: 23312 - protein, 56 aa, Artificial Sequence
  Synthetic
KDVVDRLEKELKKVNDEARKRIEELLRESDRVLEEVKKKMRELERELKKVLKEVRD

SEQ ID NO: 23313 - protein, 57 aa, Artificial Sequence
  Synthetic
DEVEDADRKVRTVLEDLRRRLEELKKHSDDVSRRNEKLLRELKEHSDRLVEEIKRDK

SEQ ID NO: 23314 - protein, 56 aa, Artificial Sequence
  Synthetic
KRVVDELLKKLRDVLEEVRRTVDELVKRSEESLRRAREVIRRLLEKTREVLEEVRT

SEQ ID NO: 23315 - protein, 55 aa, Artificial Sequence
  Synthetic
STEDVLRKIKEDVKRVIDDNRRILDEVRRTSKRVLDDLRRNLKHIAEEVERVLRE

SEQ ID NO: 23316 - protein, 56 aa, Artificial Sequence
  Synthetic
SKELLEKAKRVVDEIKRLAEESLKRLEDLSRDHKRRAKELNDEIRKVVDELRKRAT

SEQ ID NO: 23317 - protein, 55 aa, Artificial Sequence
  Synthetic
SLEEVLDEIRKLVERALRDLERNLRHVTRTSEEVLRRNEEILRRIEEKVDRVVRN

SEQ ID NO: 23318 - protein, 56 aa, Artificial Sequence
  Synthetic
SKELLDEIRRVLEEVKRRVEELNKELKDLSDKHKEKAKRTDETITDVLRKAEERER

SEQ ID NO: 23319 - protein, 60 aa, Artificial Sequence
  Synthetic
SVEELLREVAELVKRVDEDLRRLLEEVRRSNEEVIRRLEEILKRIEEENRKVVEELRRRG

SEQ ID NO: 23320 - protein, 59 aa, Artificial Sequence
  Synthetic
EETVKRLLDELRELLERLKRTIEELLKRNRDLLRDAEEKARRLLEENRKLLKKARDTAT

SEQ ID NO: 23321 - protein, 60 aa, Artificial Sequence
  Synthetic
SLEELVRDVERLVKESIEELERVVEDVRRLNTELKEKLERVAREIKKRNDDLVRELRTAG

SEQ ID NO: 23322 - protein, 59 aa, Artificial Sequence
  Synthetic
EEVIDRLRKELEDIIRESRKNLEDLLRENKRLVEEVERTLRELLRTNKELLERIREEVR

SEQ ID NO: 23323 - protein, 60 aa, Artificial Sequence
  Synthetic
SVEEMLEKIRRRATESVKRLRKILKEIKERNEKAIRDDRRLLEEIERRIREVVKRLRDAG

SEQ ID NO: 23324 - protein, 59 aa, Artificial Sequence
  Synthetic
EETVKRLEEEVEKIVRDSERNAREMLERNRRLIEESKKRTKDLLKEVEDEVRKLEEEVR

SEQ ID NO: 23325 - protein, 60 aa, Artificial Sequence
  Synthetic
SVEEIVRRIREELKKVEEDSERIVRTVEDVLRKVLETVERIVRESEKRSRDAVRRIREKL

SEQ ID NO: 23326 - protein, 59 aa, Artificial Sequence
  Synthetic
DEVATRLLKEVKEELDRLREENERLLRELKETVEKLKRDAEKVVEDDERLVRELEKRVD

SEQ ID NO: 23327 - protein, 60 aa, Artificial Sequence
  Synthetic
DIEELLEEIRRRAEEAHRRNEDLLRKIKELVKKARKDNEKVVRDIERRLREVLERVRKKI

SEQ ID NO: 23328 - protein, 59 aa, Artificial Sequence
  Synthetic
REEVKEVLKRVEDLLRTSEEETKELLKRVEDELRRSKEDSEDVLRKVEELLERIDRRVT

SEQ ID NO: 23329 - protein, 60 aa, Artificial Sequence
  Synthetic
KEIEEILEEVKRLLDKLKEDSDRILERVRELLERSKEKSREILKRVEDLLRELEKLVRDD

SEQ ID NO: 23330 - protein, 59 aa, Artificial Sequence
  Synthetic
EELRRVLEEIRRLLEEVRRKIEEASRRLKEDADRVHRKNEEILKRIEELIEEVKRRVEK

SEQ ID NO: 23331 - protein, 60 aa, Artificial Sequence
  Synthetic
KEVEDILREVDKLLKESKRKSEEALKRVKRLLDELKKTSKRILREVEKLLERLRRLKKDD

SEQ ID NO: 23332 - protein, 59 aa, Artificial Sequence
  Synthetic
KDLKKIVDDIRRKIDKVDKDNERLIKELEDRVRKAREDIRDISRRIRELVKRVVDEVEK

SEQ ID NO: 23333 - protein, 60 aa, Artificial Sequence
  Synthetic
DEVETILRDVKRLLEESRRESERVLEEVRRLIEELKKRSRDIMEEVKKLLEELREIVRRD

SEQ ID NO: 23334 - protein, 59 aa, Artificial Sequence
  Synthetic
EEARRLLEEADRLVREVDKENEDILRRIEESVREVEERIRRISRAIEESIRRVKEEVER

SEQ ID NO: 23335 - protein, 60 aa, Artificial Sequence
  Synthetic
KEVEDLLREIERLLKESRERTKKVEEDVKRLLDESRKTSEDVLREVERLIRELEKIVRED

SEQ ID NO: 23336 - protein, 59 aa, Artificial Sequence
  Synthetic
DKARKLVEEAKRRLDTVNEENKDVVRKIKEDLERVDEENRDVLRRIKRIVERVEEEVRR

SEQ ID NO: 23337 - protein, 58 aa, Artificial Sequence
  Synthetic
DEAERLLRRIEEILKRSKDVSDKLLEDNEKLVRDVKRRLDEHLRKNREALKKLREELK

SEQ ID NO: 23338 - protein, 56 aa, Artificial Sequence
  Synthetic
DEVVRRIEELVKKLEEDNKRVVEEIKKLNDDLRREVKRVLDEARKLNKEIVDELRK

SEQ ID NO: 23339 - protein, 59 aa, Artificial Sequence
  Synthetic
SEVDELRRRVEEVERRSEENSRKHLEDNEKMVDDLRKNLERHLKENKELVERVRRVVED

SEQ ID NO: 23340 - protein, 56 aa, Artificial Sequence
  Synthetic
DRVVEDLKRRADELVRRNERAAEEVRRLNEEVVEDLKRVVKEVKDLNDELVKEVRR

SEQ ID NO: 23341 - protein, 60 aa, Artificial Sequence
  Synthetic
SVEEVLKEIEKEHRRSEEEVKDVLRKARKINEEVERRVKEVVDRIRETIARVRKEVKDRN

SEQ ID NO: 23342 - protein, 59 aa, Artificial Sequence
  Synthetic
KDVLKKLLDRSRRLVEKVRDDLRKAEEKNRRVAEEIKETLKRMEDRVREELKEIKKKAK

SEQ ID NO: 23343 - protein, 60 aa, Artificial Sequence
  Synthetic
SVEEVLKEIEDLHKKSIDEVREVLKEAEDLNRRAVKEVEDALRESEELNRRVTKEVRDEN

SEQ ID NO: 23344 - protein, 59 aa, Artificial Sequence
  Synthetic
KEVLDRLLEKSEKLARDVRKRLKEVLDKNRKVVEEIRKVLEELLRHSERKLERIRERLK

SEQ ID NO: 23345 - protein, 61 aa, Artificial Sequence
  Synthetic
DVEDVVRELKKLLDEITRRSEEVVKRLHDRNEEAKEEVRRVVKEVRERLKKVVDDVRRELK

SEQ ID NO: 23346 - protein, 59 aa, Artificial Sequence
  Synthetic
REVLRKLKKEIKDLLDRIEELNKKVLDESEKLIKEIREDLRRVKEEIKEELKRIREEVR

SEQ ID NO: 23347 - protein, 61 aa, Artificial Sequence
  Synthetic
SVEEVVRRIKEKLETVVDESRRVVKDLHDKNKEIVEESRKVLRESEKVDEDVVEEVRRRLG

SEQ ID NO: 23348 - protein, 59 aa, Artificial Sequence
  Synthetic
DEELEKLLREIEDLLRKIRKLNKEVLDRSRKLLEDIRRLNKRALERNRKIAKEIRDEVK

SEQ ID NO: 23349 - protein, 56 aa, Artificial Sequence
  Synthetic
DSAEKLERDVRRALERIRKRLEENDRRVEEILERIRRRLREDLETSREVLERLRKE

SEQ ID NO: 23350 - protein, 56 aa, Artificial Sequence
  Synthetic
ESVIEKLERLLDELLEEVKRVVETSEKKLDELLEEVKRVVEESKKALDDLLREVEK

SEQ ID NO: 23351 - protein, 61 aa, Artificial Sequence
  Synthetic
DKVDEVLRRVRELLERLRKLLEDNKKTTDELLEELRRILKEDEDRTRKLLKRLRDVKREEI

SEQ ID NO: 23352 - protein, 56 aa, Artificial Sequence
  Synthetic
DRMMKRLKEELERIRKKVREVLERSSRAVERIEREVDEVVKRSSDTVKRILDEVRK

SEQ ID NO: 23353 - protein, 61 aa, Artificial Sequence
  Synthetic
SEAERVRRRVEELLRELREHSRRVLEEVKRLLEKLREDNERSLRRIKKLLDELRRVRERDL

SEQ ID NO: 23354 - protein, 56 aa, Artificial Sequence
  Synthetic
EEVLRDIERRVREIEKEVREVTRAIEESVKKIEKESRDVLRAIAETIRKIEEEVKK

SEQ ID NO: 23355 - protein, 61 aa, Artificial Sequence
  Synthetic
DEAEEVLKTVKKLLDDLRRRNEDSLRRIEELLKRLRDHSKRVLEEVRRLLEELRRVKERDL

SEQ ID NO: 23356 - protein, 56 aa, Artificial Sequence
  Synthetic
EEVLRKIKKDVEKIVRDSERVIKTIEEKIDRIKKEVKRVTDEIRKRVEEIAEEVRR

SEQ ID NO: 23357 - protein, 60 aa, Artificial Sequence
  Synthetic
SELEDVLRRSRDLLRRLKELLERLLETVRKLIEEAKELLKKILEDSRKLIREVEEMVRRG

SEQ ID NO: 23358 - protein, 58 aa, Artificial Sequence
  Synthetic
EEIRRVIKESKDLSRALEETVRRVERKIEDLLRRIKEEAERVIKESEKLIEDAERATK

SEQ ID NO: 23359 - protein, 59 aa, Artificial Sequence
  Synthetic
DEDEEVERELKKIKDKSKKVLDKSRKTIDELRKEVERTLRRWTKRSKDLLDKVEAAKRR

SEQ ID NO: 23360 - protein, 55 aa, Artificial Sequence
  Synthetic
EEVLRKVDTILKEIKRRNEKVLKELRDIIDDLAKKLDEVLRRDEELAKKVTEELK

SEQ ID NO: 23361 - protein, 59 aa, Artificial Sequence
  Synthetic
SEDEDARRTLREMLEESRKHLKEWEDTSRELEKKSREVLKETRKTIAKLADRVRKAKEN

SEQ ID NO: 23362 - protein, 55 aa, Artificial Sequence
  Synthetic
EEVLEDIRRKVEKLEEDNRRVMKKDEDAVRRVEEENRKVLKELKERIDRLAEELK

SEQ ID NO: 23363 - protein, 60 aa, Artificial Sequence
  Synthetic
DEDREAEETIKRLLDRSRKTLEESRKTSEDLRRKSEKVLRETRKSLEDSLRKVREMKKRN

SEQ ID NO: 23364 - protein, 55 aa, Artificial Sequence
  Synthetic
EKVLRDLEEIVRRAAKANKDVLDEDRRVMEEAREENKRVIDEYRKILKEATDELR

SEQ ID NO: 23365 - protein, 60 aa, Artificial Sequence
  Synthetic
SEDEEAKKTLDELLKKAEELVKKIKETSERLLRKSDKLLEETKKTIKELDDEVKEVKKRN

SEQ ID NO: 23366 - protein, 55 aa, Artificial Sequence
  Synthetic
EEVLRRIEEIIRRVTELLKKVLKEDREVVEEARKKNEEVLDRLKKIIEEAEERLR

SEQ ID NO: 23367 - protein, 59 aa, Artificial Sequence
  Synthetic
DEDEKAKRMLEEAEKKSKKHVDEVRETSKRLLEESKKLLEETDRSLRKSLERVDRVKKN

SEQ ID NO: 23368 - protein, 55 aa, Artificial Sequence
  Synthetic
KRVLDDIKTKVERLEERNKKVLDDDREMVTRAEEENRRVIKKYRDILEEARKRLK

SEQ ID NO: 23369 - protein, 59 aa, Artificial Sequence
  Synthetic
SEDEDLDRVAEKLKREHKKSVEEIKRVLKRADEESKKLVRDTERVIEEIKREVEEARRR

SEQ ID NO: 23370 - protein, 55 aa, Artificial Sequence
  Synthetic
EEVLKKLREIVRRVKEENRKVNEEVEKRLRELEEENKKVIEDLKKTVEELVERLR

SEQ ID NO: 23371 - protein, 59 aa, Artificial Sequence
  Synthetic
DDLEDIKRRLDEMREEVKRHVKRLKEVAKEIEDEHKETVRRNKEVAKKLAREIDDARRR

SEQ ID NO: 23372 - protein, 59 aa, Artificial Sequence
  Synthetic
KDKVDKVLREVTEEVKRLEEEIKKVDKEIEEIVRRVERENEEVVRDIARIVEELERKLR

SEQ ID NO: 23373 - protein, 60 aa, Artificial Sequence
  Synthetic
RELEEVIKRIEKTVTDNERANKESVDRIREIVDRLKKEIEESVRRMRDSVKKLEEEIRRR

SEQ ID NO: 23374 - protein, 59 aa, Artificial Sequence
  Synthetic
EELIRRLEKVLKEHHKRVEEIVKENEDVARDLDRRIKEIVERNRKVLEDLRRRIKELKK

SEQ ID NO: 23375 - protein, 60 aa, Artificial Sequence
  Synthetic
SEIEDALRRAERVSRESAKKLEDALRKYEKVSRDLKRRLDEVLKRYEDTSRKIAKDLRDN

SEQ ID NO: 23376 - protein, 56 aa, Artificial Sequence
  Synthetic
EETIERLIEKNKREVDKLLKKIEEVIKRNKDEVDKLLKKIEEVIDRNRRAMEEIAR

SEQ ID NO: 23377 - protein, 60 aa, Artificial Sequence
  Synthetic
SIEDELRKIVEDIEREIKKLEDDLRRVSKDHRDEVRRILEKLKEHIERLEEDADRLKKAK

SEQ ID NO: 23378 - protein, 58 aa, Artificial Sequence
  Synthetic
ETVREMIKRLEELVRRVKRRIEDVIRRNREVVDESRRRIEKAIEDNERVLKKIEEEVK

SEQ ID NO: 23379 - protein, 59 aa, Artificial Sequence
  Synthetic
SIEEEIKKVVKELEDEARKLLKKIEEHSEDLKRKLEDLLRKVEDHIRRLREEIERIKRE

SEQ ID NO: 23380 - protein, 58 aa, Artificial Sequence
  Synthetic
ETVKKAIKELRDLVDKIEEDLKRVLDENERVLREIARKIDEIIEKNERELRRVLEEIR

SEQ ID NO: 23381 - protein, 57 aa, Artificial Sequence
  Synthetic
DEAEELERRLREEVKRVETDLRRTTRELEREVEEVRRRLEKTSRENNDRSEKAERED

SEQ ID NO: 23382 - protein, 56 aa, Artificial Sequence
  Synthetic
KEVVDRLREIITDLVRKLEENVKRLEEIIKRLEEELKRNVDRLRENSKRLAERLRT

SEQ ID NO: 23383 - protein, 57 aa, Artificial Sequence
  Synthetic
SEAEKVLEEVRRLIEEIRRRLKETTDDVRRLVRELKEEAKRLLEEDKRLVDDLRRRN

SEQ ID NO: 23384 - protein, 56 aa, Artificial Sequence
  Synthetic
KEVVDKIRKVAEELKKELKDNADRVRRIAERLKEELKRVAEKSDRIIRTLEEELKR

SEQ ID NO: 23385 - protein, 57 aa, Artificial Sequence
  Synthetic
SEVERLVREVEKDLERERRRLEKTVRDSERLVRELKETLDRLLKRDKDVVDDARRKN

SEQ ID NO: 23386 - protein, 56 aa, Artificial Sequence
  Synthetic
KSVVDRLREIVKELKDRNRKVVKELEDIHRDSDRELDDVVRRSDEIIRELVERLKT

SEQ ID NO: 23387 - protein, 59 aa, Artificial Sequence
  Synthetic
DLEEIIKTIREINERLNRRVREVEERLRRTSRELEERIRDVVRKLREINDRLRKEVEAR

SEQ ID NO: 23388 - protein, 55 aa, Artificial Sequence
  Synthetic
ERLVRENEEAVKRLTKELDDLLRKNEELIRRLEEEAKRVLERNEKIARDVREELK

SEQ ID NO: 23389 - protein, 59 aa, Artificial Sequence
  Synthetic
DLEEIIRKIREINRELNETVKKVVRELEEDTRRVKRRIEEIVKELERTTRELDKRVKDS

SEQ ID NO: 23390 - protein, 55 aa, Artificial Sequence
  Synthetic
EKLVEDNRKEVRDLEEEARKLLRENHELTKRLIEEAERILKKNEELIRKIEEEER

SEQ ID NO: 23391 - protein, 59 aa, Artificial Sequence
  Synthetic
SLEELLEELERILREVEERIKEVVRRLEEDTRRVEEEIRRIVEELKRINRELEELVRRT

SEQ ID NO: 23392 - protein, 55 aa, Artificial Sequence
  Synthetic
ERLVKEVRDTVKELEDELKELLDRNHELTRRLEEEAKRLLEENKKRADDVKEELR

SEQ ID NO: 23393 - protein, 59 aa, Artificial Sequence
  Synthetic
RLDEVIRRVEEVIRDVERRVAEVVKRLRDSSKTVKEKIETVIRRNKEINKRLEDLIRES

SEQ ID NO: 23394 - protein, 59 aa, Artificial Sequence
  Synthetic
EDDLRRTLEEVKRTIDKLKEDAERLLEENKDLIRRLEEELKESSKRNDTLVKKLKKELK

SEQ ID NO: 23395 - protein, 60 aa, Artificial Sequence
  Synthetic
REMEEALKRNNELSERLRRELKRVLEENHRLSRDLEKKLRDLLERVRELVERLDRMKEEG

SEQ ID NO: 23396 - protein, 59 aa, Artificial Sequence
  Synthetic
EEVRRVLEEIRRDTEELEKDARRVLTELRRNLERLRRKVEKVLEEIRRILEELERRVRK

SEQ ID NO: 23397 - protein, 60 aa, Artificial Sequence
  Synthetic
DKLEKLEEKLEKDVRRWDDELRRDLEDSKRLVDTIRKRLEKLLRDHRELVRRIRELLRDG

SEQ ID NO: 23398 - protein, 55 aa, Artificial Sequence
  Synthetic
EVVRRLEEEVRRLEEKVKEVLRRNEEEVRRLEKDIERVLRESTKIVEDLKDEVRK

SEQ ID NO: 23399 - protein, 60 aa, Artificial Sequence
  Synthetic
SVEEVVEELERIHREVKREIDEVVDRLREINEEVRREIKEVLDKIREDLERLKEEIDRDL

SEQ ID NO: 23400 - protein, 59 aa, Artificial Sequence
  Synthetic
DDILREMLRKSEELVRESREDLKRLLEEHRKLVEESRRELERLKKEVKDAVEEVRRRLK

SEQ ID NO: 23401 - protein, 60 aa, Artificial Sequence
  Synthetic
SVEEVVEELKKIHEDVKRKIDEVLKRLKRINDELRKRIREVLERLRREAEKLMEAIRRDA

SEQ ID NO: 23402 - protein, 59 aa, Artificial Sequence
  Synthetic
DDILREMLKESKELVKRSEKTLRELEKRHRDLVREVEETLKELEREVERKVREVERRVR

SEQ ID NO: 23403 - protein, 60 aa, Artificial Sequence
  Synthetic
SVKEVLDEIRKINDDARRRLEEVLKDLKRINDELKERVDRVHDRNRRLLEELKKEIRTKL

SEQ ID NO: 23404 - protein, 59 aa, Artificial Sequence
  Synthetic
DDILREMLERNKELVKESKKVLEELEREHRELVREVKKRLDDSTEKIKTEVDKVKKELD

SEQ ID NO: 23405 - protein, 60 aa, Artificial Sequence
  Synthetic
SVEEVIKEIEKIIRDLKEELKKVLTELEKRNEELKRRVEEVHEESRRLLDTIRKEIERKL

SEQ ID NO: 23406 - protein, 59 aa, Artificial Sequence
  Synthetic
DEVLEELLRRVKKTVKEVREDLDRLRKEHEELVDRVREELERSLREIKERLERIKRRLD

SEQ ID NO: 23407 - protein, 59 aa, Artificial Sequence
  Synthetic
KEAEELLEKVRKLVKEIEDRLRKSSEENRELVKRVEDELRETTKKNKKLVDEIKERREK

SEQ ID NO: 23408 - protein, 56 aa, Artificial Sequence
  Synthetic
EDVLRRIEEILERVERAVREVLRRNKEINDRLRERVEDVVRKNEDILRRVLDEVRK

SEQ ID NO: 23409 - protein, 59 aa, Artificial Sequence
  Synthetic
DEVERLIEEVDKLVKTIEEELRRSSEKNKDAVRRVKRRLEKSNEDNREVVRRVDKERRD

SEQ ID NO: 23410 - protein, 56 aa, Artificial Sequence
  Synthetic
EDVLRTIKEILRELRERVEEVAKRNKEINDRLNEDVERVVRENKELNDRLRERVDR

SEQ ID NO: 23411 - protein, 60 aa, Artificial Sequence
  Synthetic
DEAEKLIEEVKRLVEDLERKLDESSRRNEETVKRIDKELKDSNKKNRDTVKKVTDTAKDS

SEQ ID NO: 23412 - protein, 56 aa, Artificial Sequence
  Synthetic
EDVLRTIKKILDDLERRVEEVVRRNREILKDLERKVRRVFEENEKLNRELEERVKT

SEQ ID NO: 23413 - protein, 60 aa, Artificial Sequence
  Synthetic
SKADEVEKDVDRKLKEVKKRLDETRESVRRKLEEVRRELEESEKSVETVLREVKKTKDRG

SEQ ID NO: 23414 - protein, 56 aa, Artificial Sequence
  Synthetic
EEVLKKLKDIATELRERLDRNNKELTDIHRELKERLDRNNTKLSEIHKRLEEELDK

SEQ ID NO: 23415 - protein, 60 aa, Artificial Sequence
  Synthetic
SEVDEARKRVRDVLEEVRKALEETEKSVRRTLEEVEKRLKESEDSVRKVLEDVRRELERG

SEQ ID NO: 23416 - protein, 56 aa, Artificial Sequence
  Synthetic
EEALRELEEIARRLERELEKNNKDLTDIHETLRRRLEDNNRKLSKIHEDLARELRK

SEQ ID NO: 23417 - protein, 58 aa, Artificial Sequence
  Synthetic
KEAEDMLREVKRLIDRIKKVLEDVLKAIEELIRRLEDIHRKVNEDSERLTEDLKRTIG

SEQ ID NO: 23418 - protein, 59 aa, Artificial Sequence
  Synthetic
KEKIEELLRRVEELIRRIEEEVRKLLEDVERKIRESVKEAEELLRRSKKEIERVKREDT

SEQ ID NO: 23419 - protein, 58 aa, Artificial Sequence
  Synthetic
SEAERVIRESERLTDELRKELEKALRRSKKLSDELRKIHEDANREVRKLIEDLKRTIG

SEQ ID NO: 23420 - protein, 59 aa, Artificial Sequence
  Synthetic
EEILKKLLDESRDTVRRVEDTVRKLVRRSEEFVRKSKERVKRLLDDVRRKIEDVKRKTK

SEQ ID NO: 23421 - protein, 59 aa, Artificial Sequence
  Synthetic
DEEERLLREAEEMHERNKRLIDKLRREVEESLKEVEREIRRLLTDIARLVRRVEELKKN

SEQ ID NO: 23422 - protein, 55 aa, Artificial Sequence
  Synthetic
EEVLREIRKLVEESRKILEKVIRDWRRITEELKDRLRRVLEELKKLVDELRKTLT

SEQ ID NO: 23423 - protein, 59 aa, Artificial Sequence
  Synthetic
SDRERLLEEIKDLNRRNKEILERILRRSEELLKKAEDLLDKIKRDSDRAARKVEELKRR

SEQ ID NO: 23424 - protein, 55 aa, Artificial Sequence
  Synthetic
EEVLRRLEKIVRDSERELRRVREEDKKVADEIREKLKRVHDESERIVRELKETLR

SEQ ID NO: 23425 - protein, 60 aa, Artificial Sequence
  Synthetic
KELEDVKKRVDDLLRENERVVRELLESSKRLNEENEEAVRRLDESSKELAKRVKEIKDRG

SEQ ID NO: 23426 - protein, 58 aa, Artificial Sequence
  Synthetic
RDVRRVLEFVKEVIKEIERIHKKVNDDNRKLIEESIRRLKKVLDDNKRVIDELRKTLK

SEQ ID NO: 23427 - protein, 60 aa, Artificial Sequence
  Synthetic
DEEEEVKKRVEELLDELRKSIKKSVDDSKRVLDEARKSVERSREELEKLLRALEDILRKG

SEQ ID NO: 23428 - protein, 56 aa, Artificial Sequence
  Synthetic
LRRLEEEAKRLVEEVRRRDEEHLKRSEELLKEVEERDRELLKRARDLFEDVRRKIE

SEQ ID NO: 23429 - protein, 60 aa, Artificial Sequence
  Synthetic
SEKEEVAKRLEEALKRLEDTIRKVSEENERVLRTLEDRARKSAEKVERLLEELRKRLEDS

SEQ ID NO: 23430 - protein, 56 aa, Artificial Sequence
  Synthetic
LEELKKRVEELTREVEEEIRRLKETSKRLEEEVKRLIEDHDRRVRELKDEVERRIR

SEQ ID NO: 23431 - protein, 57 aa, Artificial Sequence
  Synthetic
DEAREVIKTLRKLLRDSAEILTRVTEEDREVLRELAEIIKKVTDEDRRVLEEARREL

SEQ ID NO: 23432 - protein, 59 aa, Artificial Sequence
  Synthetic
DRILEELLERIKRLHEENKKAVDRWREESKKLKEEVKKKVKEWKDTSEELLRRVKERAR

SEQ ID NO: 23433 - protein, 57 aa, Artificial Sequence
  Synthetic
KEVEEVIKTLRRLSEKLAREHKKVIDELRDLLRRSEEELKRVAKADEDLLDEIRRKV

SEQ ID NO: 23434 - protein, 59 aa, Artificial Sequence
  Synthetic
EEILEEVKERIDRLVKENKEIVDRSRELAKELHDRNREMLTKWLEDSKRLVEEAEKKAR

SEQ ID NO: 23435 - protein, 59 aa, Artificial Sequence
  Synthetic
DKEKEVTDELRKAKRDNDEVVKEIEKESRRLLEEVKETVKRDKKVLRELEEEVKEAKKK

SEQ ID NO: 23436 - protein, 55 aa, Artificial Sequence
  Synthetic
KKVLDEIRKVLTEAKKMHDDVLRRDREVLETARKLSEDSKKENEDVLRKVAEELR

SEQ ID NO: 23437 - protein, 58 aa, Artificial Sequence
  Synthetic
DEERDLERKLEEVIRRAKETSERLNRELERVIEEVRRRHEEAKRRAEEVIRRILKRLG

SEQ ID NO: 23438 - protein, 56 aa, Artificial Sequence
  Synthetic
KDEVDELVERLKRDIDRWAEDVKKLIEDLRRMVERNLREIDKLLKDLKRVVDETKK

SEQ ID NO: 23439 - protein, 60 aa, Artificial Sequence
  Synthetic
SEADKLLDEVRKRVEDMERRLEELVREDRKLVEDHHRDNKRLLDRVKKLAEDMERLIDRG

SEQ ID NO: 23440 - protein, 59 aa, Artificial Sequence
  Synthetic
SEKAEDVRRRLKELAERVRRVVRRVEEESKRTLKELEKSSKELAKKLRDLVETVERRLR

SEQ ID NO: 23441 - protein, 60 aa, Artificial Sequence
  Synthetic
SRVDDLLREAERLAEEHHRLNKKLVDEDRELVRRHHETNRRVLEEVKRLVEEAEKLIRRG

SEQ ID NO: 23442 - protein, 59 aa, Artificial Sequence
  Synthetic
SEEAKRVAERVRRLLERLRESSKRVKETSKETLERLRRSSEKVEEDLRKLIEDVERAAR

SEQ ID NO: 23443 - protein, 60 aa, Artificial Sequence
  Synthetic
RELEELVKRDREEVRKHHELNKELLDRARKLVRDHHERNKRLVREDEELVREAKELIERG

SEQ ID NO: 23444 - protein, 59 aa, Artificial Sequence
  Synthetic
SDEARKAKRESERTLKELEESSREVEKELRRLLKELRESSKKVEDDSRKSLERVERALR

SEQ ID NO: 23445 - protein, 60 aa, Artificial Sequence
  Synthetic
SKADELVKKDREKVEEMERRLRKILREVEELVKEHHERNKRVLDEVKKRVDDAKELIKRG

SEQ ID NO: 23446 - protein, 59 aa, Artificial Sequence
  Synthetic
SRKAEEVEKDSRRTLERVKDVLRKVEETLRELLDRLRESSERVTEALKRLMEEVREALR

SEQ ID NO: 23447 - protein, 61 aa, Artificial Sequence
  Synthetic
SKLEALVKEVEELVKKAKKDLDRLVEEDKKLAEEHHDRNRKLVDTVRELVERAKEDIDRRG

SEQ ID NO: 23448 - protein, 58 aa, Artificial Sequence
  Synthetic
KELEEVVKELRRLLKELEEVVRRVARESEKSLEEVRRSSEEVKKALDKLLKELEDAVR

SEQ ID NO: 23449 - protein, 59 aa, Artificial Sequence
  Synthetic
SELERIVEEVKKLVEDHKKKLKDIVEEVEELVRRHEKKLEDILRRNEKRVRELKEEVRR

SEQ ID NO: 23450 - protein, 59 aa, Artificial Sequence
  Synthetic
RKKAEEVKRRLEELLKEANKASEEVKRTLDKLLEDVNRESERVERASDELLKRLRDDAR

SEQ ID NO: 23451 - protein, 61 aa, Artificial Sequence
  Synthetic
SELEELVKTVKKLVEDHKRRLKELLERARRSTEDLKRKLEKLVRDVRKLVEDAKDAIRKSG

SEQ ID NO: 23452 - protein, 59 aa, Artificial Sequence
  Synthetic
KDELKKVEDALRRLLEELNEVSEEVERALRELHREVEEAIRRVEKELDRLLKEVEDAAR

SEQ ID NO: 23453 - protein, 59 aa, Artificial Sequence
  Synthetic
RELEEILKESEKSVEDIKRELEKIKKKSKTDLEKWKDDLRKIRKEIADLVRKVTREVED

SEQ ID NO: 23454 - protein, 58 aa, Artificial Sequence
  Synthetic
EKVKRVLDELKRSLEEVRRALEEVREVLRESLKRLRDLAEDLKRELRELLKELEERAR

SEQ ID NO: 23455 - protein, 60 aa, Artificial Sequence
  Synthetic
SEKEDVERRIRRLIERLRRMIEELRRRNTDILRKVRELVEEVKKADERSIREVEKLLRDV

SEQ ID NO: 23456 - protein, 56 aa, Artificial Sequence
  Synthetic
LDELIERAERLVREIERKLRKAIEDSKDLLRRIEERLRRLIEKSEKLLRDIKREVD

SEQ ID NO: 23457 - protein, 61 aa, Artificial Sequence
  Synthetic
SEIEKLVKEIEDHLRRLKEEIEKSSRELKKHLDELERRADKIVRDLRRLVEEIKDTIRREG

SEQ ID NO: 23458 - protein, 59 aa, Artificial Sequence
  Synthetic
REAVERLRKALKESKERLKKALEDNRRTLKKSEEDLKKVMEEVKETLDRVKKEVERALD

SEQ ID NO: 23459 - protein, 61 aa, Artificial Sequence
  Synthetic
SEIEKLARDAEEHLRRLLEELRKSSDDLRRHLEELKKKLKEIVDRLKELVDRIKDTIRREG

SEQ ID NO: 23460 - protein, 59 aa, Artificial Sequence
  Synthetic
KKVIDDLRRILEESARRLKRAAERNDETLKESADRLRRAIDRLREVAEKLSRDVRRAAK

SEQ ID NO: 23461 - protein, 61 aa, Artificial Sequence
  Synthetic
SEIEDIARRLREHLEDLKKKIKDSSDELRKHLEEVKRRIERTSEKLTDDVRKIEEKIRKDG

SEQ ID NO: 23462 - protein, 59 aa, Artificial Sequence
  Synthetic
EERIRDLEKILEDSERELRDMARKNRETAERSERELRKVLRENDRTAKKLTDDVRRTAK

SEQ ID NO: 23463 - protein, 61 aa, Artificial Sequence
  Synthetic
DEIDKLVEDVERHLEKLLREIERSSEELKKHVEDLREKLRDLVRRLKEVVDEIRKTVRDKG

SEQ ID NO: 23464 - protein, 59 aa, Artificial Sequence
  Synthetic
KEDVDRLREMLERSRRRLKRAADENRRTAEKSRKELKEVAERVRRALERMRREVEEELR

SEQ ID NO: 23465 - protein, 61 aa, Artificial Sequence
  Synthetic
SEIEEIAKKLEEHVKRVVEEIRKSSEEAKRHVEDVKRKIEELVRELARLVKEIKEAIRRDG

SEQ ID NO: 23466 - protein, 59 aa, Artificial Sequence
  Synthetic
KERIDELREIAKRSRDKLKKVADENRRTLEKSLRDLARAVEELRRRAKRLEEEVRRERT

SEQ ID NO: 23467 - protein, 61 aa, Artificial Sequence
  Synthetic
SDIERLVEEVEKHLKELEDEIRKSSEELKRLAEEISRDIRRTSEELKKLIEDIKDTIRRDG

SEQ ID NO: 23468 - protein, 59 aa, Artificial Sequence
  Synthetic
KEKIDRLRKILEESEKRLEELARENERTVKEVKKEIDDMVRENEETAKRLLDEVRETLR

SEQ ID NO: 23469 - protein, 56 aa, Artificial Sequence
  Synthetic
DELEKLLEDLRRKIRKIKEDLRKTSKENRDELRKSKKRLEDLVREVRRLVEEIRKL

SEQ ID NO: 23470 - protein, 55 aa, Artificial Sequence
  Synthetic
EEVEKTLRELIKEIEKVLEDDERTVRELIERNKELLDRLAKEVDRLIEEIKREAD

SEQ ID NO: 23471 - protein, 57 aa, Artificial Sequence
  Synthetic
SEADKVRKELDDVRRRVKKALDDIRRELEKLVKEVEDALRDHERSNEELVREVREKL

SEQ ID NO: 23472 - protein, 55 aa, Artificial Sequence
  Synthetic
DRVVEEIRDMMRKLKRELERIVEEAKKVVEDLKRRLEEVSRRSADLVRRLKERAR

SEQ ID NO: 23473 - protein, 55 aa, Artificial Sequence
  Synthetic
SDLERVKKDLEDVVRRVEEVLREHKRTNDEIIREIERLIEELRKENERLAREVRD

SEQ ID NO: 23474 - protein, 55 aa, Artificial Sequence
  Synthetic
ERVVDEIRKVVKELEERLRRLSEESRKLVKDIKEKLDKLAEDSRRLVEKLERDAK

SEQ ID NO: 23475 - protein, 61 aa, Artificial Sequence
  Synthetic
REFEELVERVKRVVEELTRRLRETSEETKTVLEKLRKELEEASRRIEDVLRRLTEKIRKDG

SEQ ID NO: 23476 - protein, 55 aa, Artificial Sequence
  Synthetic
EELEETLERLVEAIRDALRKDEETMRRVAEAIRRLLEDHRRSLEEVLEKIRDALR

SEQ ID NO: 23477 - protein, 61 aa, Artificial Sequence
  Synthetic
SEAEKIVEDIRRVIRELKEKLKKTSEDTEDTVRKLSRRLRELAKRSAELVERVTREIRKDG

SEQ ID NO: 23478 - protein, 55 aa, Artificial Sequence
  Synthetic
EELEETLRRVAEEIRRLLEEDRETLRRVERKIREMLKELEEINRRLIKEVDEEVK

SEQ ID NO: 23479 - protein, 61 aa, Artificial Sequence
  Synthetic
DEVEEIVRRIEEVLKDLRRRLETLARESRDLVRKIKEELRRHSDESRRLLERIKERIRRDG

SEQ ID NO: 23480 - protein, 55 aa, Artificial Sequence
  Synthetic
DELKKEADRVKKEIRDMLRKLKKINDDLIREIEEALKDNERTNREIIRRIEEELR

SEQ ID NO: 23481 - protein, 61 aa, Artificial Sequence
  Synthetic
DEAEKIVRDIEETVRRLARELEKHSEDSRRLVERIKEELTRHSKKVADVVRELKKRIKRDG

SEQ ID NO: 23482 - protein, 55 aa, Artificial Sequence
  Synthetic
EELEKRMRRLVKEIERMLEENKRTNEELVREIEEALKKNEETLRRLKREIEEALR

SEQ ID NO: 23483 - protein, 56 aa, Artificial Sequence
  Synthetic
SEAEELVKDAERVVEELERRLRKVSEDIDREVKKIKRELDEHSKRVKETVDDVRRR

SEQ ID NO: 23484 - protein, 55 aa, Artificial Sequence
  Synthetic
EELKKRVEDLIRTIKELIKRHDDSVKEVEKRIREMLERNRKSVEEVIEELKRTSK

SEQ ID NO: 23485 - protein, 61 aa, Artificial Sequence
  Synthetic
SELEELVKEVKELVDRSKEELKKLSEELKKLLDDLIKRIEDLSRRSKRLVEELRRRVEERG

SEQ ID NO: 23486 - protein, 58 aa, Artificial Sequence
  Synthetic
EEMKRVEEELKRLREEDREAVERHDESIRKLREDLRRAVETHKKSNRDLLREVEETVR

SEQ ID NO: 23487 - protein, 59 aa, Artificial Sequence
  Synthetic
DEVEELIRKIEDLLRRIEEKVTKAIRKSERLLEEIKKKIKEMIDKSERLVEEVERRTRN

SEQ ID NO: 23488 - protein, 55 aa, Artificial Sequence
  Synthetic
EDVKRVLKKVADDVERLLRDLERRNRKVREDVKRVLEELRKSNERSIRRIDETLR

SEQ ID NO: 23489 - protein, 59 aa, Artificial Sequence
  Synthetic
REIEEIIKRARELLEEVEEEWRRLIEKSRRLLEELKKRWDKLIEKSKDLLRKIEKTTKD

SEQ ID NO: 23490 - protein, 55 aa, Artificial Sequence
  Synthetic
DELRKILKRVEDENRRLVEEVERSNRRSMEENERLAEEVRRSNKDVIDKIRERLR

SEQ ID NO: 23491 - protein, 60 aa, Artificial Sequence
  Synthetic
DELERLSESVKKAERRIERLNEELNERVKEVTKAIDDLNKRLNDESKRVKEELRKVLARS

SEQ ID NO: 23492 - protein, 59 aa, Artificial Sequence
  Synthetic
EEVIKRVLDDVERAVDEVRKLIEDVLKEHEDILREVKKELDKAIERHKEILKRVREDIK

SEQ ID NO: 23493 - protein, 60 aa, Artificial Sequence
  Synthetic
SVLEDLARKVERVIREAKKVNEELNRRSEEVRRRADEVVADLNRESKKVDDELKKVLARS

SEQ ID NO: 23494 - protein, 59 aa, Artificial Sequence
  Synthetic
EEVARRVVEELKKVLKEIEDEIRRVIERHKEALDEVRRLVKELKDRHDKILREVREKIR

SEQ ID NO: 23495 - protein, 60 aa, Artificial Sequence
  Synthetic
SSEDRLRETVEDVIRRARDANRELNKASRDVEEESKKLNKELNDRSRKVERDLEEVLRRS

SEQ ID NO: 23496 - protein, 59 aa, Artificial Sequence
  Synthetic
EEVIERLIRDLRRVLEEIKREIEEALRDHERVLKENEDMVREILRRHEEILKRMTDEIR

SEQ ID NO: 23497 - protein, 60 aa, Artificial Sequence
  Synthetic
SVLERVADELRKVEEAIDRLNKELNDAVERVERESRRVNKELNDASERVERELDEVLKRT

SEQ ID NO: 23498 - protein, 59 aa, Artificial Sequence
  Synthetic
EEVAKELIDRIRKLLDDIRRKLEEVLKRHEEVLKRNEDTIRKVLKRHEEILEKVKRDIK

SEQ ID NO: 23499 - protein, 60 aa, Artificial Sequence
  Synthetic
SSKERLREAVERVERESDKVNKELNDKSRRVTEELRKLAEELNRRSKEVEEELDKLLARS

SEQ ID NO: 23500 - protein, 59 aa, Artificial Sequence
  Synthetic
EEVIRRLIEELDRLLEENDRRIKKAIEDHKRILEKAEREVREILRRHEKILEDVREEIR

SEQ ID NO: 23501 - protein, 57 aa, Artificial Sequence
  Synthetic
DEEEDLRRAIERVIETVRRLVERVEEESKRVADELRKLTKRLEEVVRKVDEDARKEV

SEQ ID NO: 23502 - protein, 54 aa, Artificial Sequence
  Synthetic
DVKRRLEELLKRAKEVLDELIKRHRDLLRRHEEKVRRLIKRIEDLLRELSKKAK

SEQ ID NO: 23503 - protein, 57 aa, Artificial Sequence
  Synthetic
SKEEELEKIVRKIREDLRRAVKEVEDESKRVLESTKKALDTIRRVSEKVIEDLRREL

SEQ ID NO: 23504 - protein, 56 aa, Artificial Sequence
  Synthetic
VDELVRRLEELLKELRKRLEDLIRRHEDINRRNHELIRRAIEEHRRLLREAREREK

SEQ ID NO: 23505 - protein, 57 aa, Artificial Sequence
  Synthetic
DEIEELIKKLREDLDRSRREVEKNSEDLKELIKRSEERIEKLIEDLERMVDDARRKN

SEQ ID NO: 23506 - protein, 59 aa, Artificial Sequence
  Synthetic
EKLLKKLEDVIDDVRRRDEDVVRKNEESLKRIEKRDEELIRKIEEVIRRAERKVDEVMR

SEQ ID NO: 23507 - protein, 57 aa, Artificial Sequence
  Synthetic
SKIEELIKELEKLSRTNEELVKRVLEELTRLVEESAKRIEDIIRRLKEVVDKARREN

SEQ ID NO: 23508 - protein, 59 aa, Artificial Sequence
  Synthetic
KKLLDKIKKAIEDLERENERALKELEKRLRELLRTDRELIRKIEEEIKKLRREVEEVLR

SEQ ID NO: 23509 - protein, 60 aa, Artificial Sequence
  Synthetic
SIKERLTEVLKRLAEEIRKVIEENKRTVDRAREEVERVIRKNREVLKRIKERADEVIKRI

SEQ ID NO: 23510 - protein, 59 aa, Artificial Sequence
  Synthetic
ERVVEELIREAKKIVEDIVRRVKRHSREVERIVEEIRRRAEEHIERLKRSLEEVEKKVD

SEQ ID NO: 23511 - protein, 60 aa, Artificial Sequence
  Synthetic
RIMEKLEEVLKELRKKIKKLNKDNEETVRRIKKEVDKVIKKNRDVNERIRKRLEEVISRI

SEQ ID NO: 23512 - protein, 59 aa, Artificial Sequence
  Synthetic
EEVVEKLIEDMERVVAESAKENKKHSDDVKRILDEIRRKAEDHIRKTEELLRRIEERTR

SEQ ID NO: 23513 - protein, 60 aa, Artificial Sequence
  Synthetic
SIKEKLTEELERLAKRIREANEDNKRTVEEVEKRIREVIKKNRDSNKEIKDDVERVLSRI

SEQ ID NO: 23514 - protein, 59 aa, Artificial Sequence
  Synthetic
EEVVERLLKKMREAVKKSEDENREHSERVKRIIEKIAREAEEHSKRTKELLDRIREEVR

SEQ ID NO: 23515 - protein, 60 aa, Artificial Sequence
  Synthetic
RVDEDLKRVLDELKKRVEDLNEENKKTVEDISRRVREVIKRNEDMLREVKKRAREAISRI

SEQ ID NO: 23516 - protein, 59 aa, Artificial Sequence
  Synthetic
EEVVRELIKKMRDVVRKSEKDNKDHSERVKRILKRIEERAREHTRRLEEVLRKVEEDVR

SEQ ID NO: 23517 - protein, 61 aa, Artificial Sequence
  Synthetic
RVKEKLREVLERLEREIRKILKDNKETVKRIEEEARRAVEKNKEALKRLEDRVRELLEDKD

SEQ ID NO: 23518 - protein, 59 aa, Artificial Sequence
  Synthetic
EEKVERLAEELRKIVRKIIEDVRKHSEDVRKILEDVKKEVDDHVREMEEIVKRLEDEIR

SEQ ID NO: 23519 - protein, 60 aa, Artificial Sequence
  Synthetic
SELEEIVKEIKRILDEHEKKVRRNSEEMKRIVDRHAERVEKLIREIEELLRRLDELVKRG

SEQ ID NO: 23520 - protein, 56 aa, Artificial Sequence
  Synthetic
EEDLERMAREIKDRLDKIDEENKKSSEELKRELDRLDEKLRDVARRIMEAIDERTR

SEQ ID NO: 23521 - protein, 60 aa, Artificial Sequence
  Synthetic
DELREIVRRIEKILEDHARTIEEVIERIRDILRKHEKLVEEVLRRIEKLLKELEEMVRRG

SEQ ID NO: 23522 - protein, 56 aa, Artificial Sequence
  Synthetic
TEDLERMAERVKRELERLNKKAEDALREVKRALDDLDRDLKRVLEEIKERIRRATT

SEQ ID NO: 23523 - protein, 60 aa, Artificial Sequence
  Synthetic
SELERILTEIEKRIEEHERRIKENSKRMKEIVDDHERKVEEVLRRIRKLLRDLEEMVKRG

SEQ ID NO: 23524 - protein, 56 aa, Artificial Sequence
  Synthetic
REDLEKVARDVEKRLEDANRENEKSSRELKRRLDELDKKLEEEARRIKKAIDDKTR

SEQ ID NO: 23525 - protein, 60 aa, Artificial Sequence
  Synthetic
SEVDEVAKEIRRILEEHEEEIRRNSEEAKRILDEHREKLKRNSDDMRRIVKEIEDMRRRG

SEQ ID NO: 23526 - protein, 56 aa, Artificial Sequence
  Synthetic
EEDLREVAERVKKDLDRLNRENDESSKEIEKDLKRLDDRNRDVSEKLKKEIDELTK

SEQ ID NO: 23527 - protein, 60 aa, Artificial Sequence
  Synthetic
DRLREIVKRIRDILKEHEDRIRENSKRARDILREHKRKIEEVLRRIEKLVEDLERLKRRG

SEQ ID NO: 23528 - protein, 56 aa, Artificial Sequence
  Synthetic
EEDLRRAAEEVKKKLDELNEENERSSEDVKRTLKKLNDELREKVRRVMERIDEAVR

SEQ ID NO: 23529 - protein, 60 aa, Artificial Sequence
  Synthetic
DEVEDVLRKIEKILDDHRKRIEKNSRDMARIIDEHRRKVEENSREMKKLVDDLKKAVDRG

SEQ ID NO: 23530 - protein, 56 aa, Artificial Sequence
  Synthetic
EEELKEVADRVKEKLDRLNRENEKSSEELKRELDKINDENRETSERLKREIDETTR

SEQ ID NO: 23531 - protein, 60 aa, Artificial Sequence
  Synthetic
DELREVVKTIEEILRDHERKVRDNSRRMKEIIKRVKEELERVIKEAKELVERLKEAVRRG

SEQ ID NO: 23532 - protein, 56 aa, Artificial Sequence
  Synthetic
EEDLRKMAEDVKRALDKINRDNEESSRRLKKELDDVLRKVEEVIRRLEEEIDRLTT

SEQ ID NO: 23533 - protein, 59 aa, Artificial Sequence
  Synthetic
SELEKIEEDIRRILKEHKDTVRKNSEDIDRSVKEVKERIDKILKEIDDLLKELRELVER

SEQ ID NO: 23534 - protein, 56 aa, Artificial Sequence
  Synthetic
REDLERVVREVKKELDDINRENRKSSEEAKKKNDDVLAELEKRIREIKRRIDEDAT

SEQ ID NO: 23535 - protein, 60 aa, Artificial Sequence
  Synthetic
SDLEKLVEEIKRLLKELKERVTKNSEDMKREVERHKELVKKLKKRIEDLLRELEDAVRKG

SEQ ID NO: 23536 - protein, 56 aa, Artificial Sequence
  Synthetic
REDLERVVEEVKKEIDKIVEENRDSSRKLKERLDEANEELERRVEEIERRIDEKAR

SEQ ID NO: 23537 - protein, 60 aa, Artificial Sequence
  Synthetic
DELREIVTRADETLKRVADKIEENSRRMEEIVREHERKVRELLKRIEKLVRDLSAMVRRG

SEQ ID NO: 23538 - protein, 56 aa, Artificial Sequence
  Synthetic
EEDLRRVVKRVKETNRRLLEKNKDSSRKLKKRLDEANKTLADALEEVKRRIDERRK

SEQ ID NO: 23539 - protein, 60 aa, Artificial Sequence
  Synthetic
DELDEIVKRAKETVEKVKREVDANSKDIERILREHRKKVDKNSKDMEDLVRKLEELVRRG

SEQ ID NO: 23540 - protein, 56 aa, Artificial Sequence
  Synthetic
EDELREAVERLERENRKVLEENRRSSEKVKRDLDRVNRENEEVSERLKKRIDEAAT

SEQ ID NO: 23541 - protein, 60 aa, Artificial Sequence
  Synthetic
SEIEKIIKELDDLVKEDEDTIRRLEEELRELLKEIDREAKKSDEELEKTLEELAKIARDG

SEQ ID NO: 23542 - protein, 55 aa, Artificial Sequence
  Synthetic
EELRRVLERVAEDSKRTLDRLERVLKEVERRVDEALKRNKTVLDKVREDVKRLKD

SEQ ID NO: 23543 - protein, 59 aa, Artificial Sequence
  Synthetic
REIEEMIKRNEKLLEDDKRKVKRIIEKLDKVLEDDRKRAEDLIRKLEKVAEEIARLRDK

SEQ ID NO: 23544 - protein, 59 aa, Artificial Sequence
  Synthetic
EELLDTLRKVNERVARESEKTIRELEKVLERVNRESKKTIEEVEKALKEVADRVTEVRR

SEQ ID NO: 23545 - protein, 59 aa, Artificial Sequence
  Synthetic
SEIEKLIKENKDLLEEDKRRVEEVIEKLERVIEEDKRRVDEAIKRLDDVAREIERLRKD

SEQ ID NO: 23546 - protein, 59 aa, Artificial Sequence
  Synthetic
EDLLRRLERVNEEVARRSEDTIRRLREVLKKIEDDSRRTIDELREVLKRVKTRVTEVRR

SEQ ID NO: 23547 - protein, 59 aa, Artificial Sequence
  Synthetic
DDIERLIKRNKDLLDRIREEARKLIERLKKVLEDDRRKVERAIERLEEVVDEVRKLKKD

SEQ ID NO: 23548 - protein, 59 aa, Artificial Sequence
  Synthetic
EEVLRKLKKANEDVEREVRKMIEEVRRVLRKVEEDSKRTIKKLKDVLKKVAEEMEKVRR

SEQ ID NO: 23549 - protein, 59 aa, Artificial Sequence
  Synthetic
DEVEEAIKELEDALRKDREAVERMIRDLERLADEDRREVEDHVKKIEELIAAVERMSRD

SEQ ID NO: 23550 - protein, 59 aa, Artificial Sequence
  Synthetic
REVLEKLKEVLKRVEKASRKTNEDVKRVLDEVRRISEETNRRNERVVEEAKERVERVAK

SEQ ID NO: 23551 - protein, 60 aa, Artificial Sequence
  Synthetic
SEVDEVIKRLEELVERHRRKVEEVIRRLEKLAEDHERKVRELEKRLRELIKRIEELARRD

SEQ ID NO: 23552 - protein, 59 aa, Artificial Sequence
  Synthetic
SRDFDRLEDVARRVKEDLERTDEEVRRVAEEVRKRVEKTTRDVERVVREVERAIEERRR

SEQ ID NO: 23553 - protein, 61 aa, Artificial Sequence
  Synthetic
DEAREVIKTLEKLLEEHERRVREVIKRLEELIKRHEDRVREVIETLKRLLEEAEKIVRRDG

SEQ ID NO: 23554 - protein, 59 aa, Artificial Sequence
  Synthetic
SEDMRRLEEVIRKVKEALKRTNDRLREVVDEVKKRLDKTDEDATRVVEEVKKRIDEAAK

SEQ ID NO: 23555 - protein, 61 aa, Artificial Sequence
  Synthetic
DEVETVIRRLEELIREHKEKVDRIIKELEKLLRKHEEKVKKVIEELRRLAKEAADIVRRDG

SEQ ID NO: 23556 - protein, 59 aa, Artificial Sequence
  Synthetic
SRDMERLERVIRKVEEDLDRTNREVEEVIRRVEEEVERLDREAEEVVRDVKEKIDRLKK

SEQ ID NO: 23557 - protein, 61 aa, Artificial Sequence
  Synthetic
SEAEKVIKELRDIVKRNDEVVKEIIRRLEELVKEHKRLVEEIIKRLRELLKRIEEVVRRDG

SEQ ID NO: 23558 - protein, 59 aa, Artificial Sequence
  Synthetic
SEDLKRLKDVLDEVIKKTDELLREVERKAREVTKRLRDLDRRVKEVADEVRRRIREATK

SEQ ID NO: 23559 - protein, 63 aa, Artificial Sequence
  Synthetic
EEEERVKEFLDRVDTEDKKLVEELRKVVERVKRENEKLIKESEDMSKKVEDDARRLIAELRRE

SEQ ID NO: 23560 - protein, 55 aa, Artificial Sequence
  Synthetic
KEVVRKLEEYLRRSRKLVDELKKKLRELLERSREKVERSKEELKRILEEVRKKAK

SEQ ID NO: 23561 - protein, 61 aa, Artificial Sequence
  Synthetic
SVSERLRRVLERVAREVKRLIDEDRKVNEEAEREVRKLIKKDEDALKRVAEEVERLIREAS

SEQ ID NO: 23562 - protein, 59 aa, Artificial Sequence
  Synthetic
EEIIEELIRRLEEIVKRLEEKHRTTVKKIEDIIRELKKTHDKTIEDLRRIIEEIEERVR

SEQ ID NO: 23563 - protein, 59 aa, Artificial Sequence
  Synthetic
RVREELRKVLKRAAEAVERVLRKNEEVLRRAEERIRRLLEENEKSLEKVERDVTRILEG

SEQ ID NO: 23564 - protein, 59 aa, Artificial Sequence
  Synthetic
EEKVKKLIREIEEVIDRLRRESEKHIEEIKEIITRLDKEVKDHDERLKREVDKLEERAR

SEQ ID NO: 23565 - protein, 60 aa, Artificial Sequence
  Synthetic
SVEERLRKVLEEVRRLLEKIIKDNREVLKRAEEKVRELIKRDKDVLDRIAEEVERLKEKG

SEQ ID NO: 23566 - protein, 59 aa, Artificial Sequence
  Synthetic
EEKVDRLIEELKKLIDDAREKNERHIEEIERIIDDLRRKHEETARRLKEAIDRLREEAQ

SEQ ID NO: 23567 - protein, 59 aa, Artificial Sequence
  Synthetic
DKEERIERVLKRVEEELKKLKERIEEVLKKVEDMVRKNLEEIRKVSEDHERTVREIRKR

SEQ ID NO: 23568 - protein, 59 aa, Artificial Sequence
  Synthetic
EKVVEEIIKELERLLEDLKRRADELIKRLEKLVEEHHRKVEELVRRLEESLDKVRRDAK

SEQ ID NO: 23569 - protein, 60 aa, Artificial Sequence
  Synthetic
SEDEKVKRVVEKVKEESDRLNEELKRVVDEVRKELERLIEKIKRSVERMDRTVRELLKRI

SEQ ID NO: 23570 - protein, 55 aa, Artificial Sequence
  Synthetic
DRVVEKLKKALDESRKTHKKLIDDLRRALEELEKRVEDLNRENERLLDEIKKRVD

SEQ ID NO: 23571 - protein, 59 aa, Artificial Sequence
  Synthetic
DVERKIEEVVRDVKRELDRLLEENRRSVERVERALDKLLEDSRRVVEEVKKALDDLRRR

SEQ ID NO: 23572 - protein, 59 aa, Artificial Sequence
  Synthetic
ETDVKKIIEDLRRLVREVEEHSRRTNRRLEELVKDLARHAKRSIDRLKELVDRARERAR

SEQ ID NO: 23573 - protein, 59 aa, Artificial Sequence
  Synthetic
DVEKDIERVVEDVKRELRRLLKEDRDVSKKVKDDLDKLLKESEEVVRRVKKELDRLREE

SEQ ID NO: 23574 - protein, 59 aa, Artificial Sequence
  Synthetic
KSAVDEIIRRLKELVKEMKRHVDKSIKDLEELVRRLEEHIRRSIERLKKLVEEAREDAR

SEQ ID NO: 23575 - protein, 59 aa, Artificial Sequence
  Synthetic
SVEEEVDKVVKKLEEDLDRLLEESKEVVERVEKALDDLLKRDEDVSEEVRRELERLKEE

SEQ ID NO: 23576 - protein, 59 aa, Artificial Sequence
  Synthetic
ESMVKKLLDELRKLVEDAREHVERSIRELEKLVKEADDHVRKSIEDLKRLVEEVRETAR

SEQ ID NO: 23577 - protein, 59 aa, Artificial Sequence
  Synthetic
DVEKEIKDVVDKAKRELDRLLREDREVSREVKEALDKLLEDNRRSVERVERELDDLRRR

SEQ ID NO: 23578 - protein, 59 aa, Artificial Sequence
  Synthetic
ESVVKEILKRLEKLVEDAKRHVEDSIRKLKKLVDDMRKHSERSNRDLERLVREAREKAR

SEQ ID NO: 23579 - protein, 59 aa, Artificial Sequence
  Synthetic
SVEEEIRKVVEEVKRELDRLLEKNDRSVKEAKKELDRLLEENRRAVEEVKKALDELEKN

SEQ ID NO: 23580 - protein, 59 aa, Artificial Sequence
  Synthetic
ESEAKRLIDRLRELVKRVAEHSERSDRELKKLVDDLREHSKRSNDDLRRLVEEAEREVR

SEQ ID NO: 23581 - protein, 59 aa, Artificial Sequence
  Synthetic
SVEDKVREAVRRAKEALKKLVEDDRRVVKEVEEMLDTLLDKNRDSVRRAKEKLEDLKRK

SEQ ID NO: 23582 - protein, 59 aa, Artificial Sequence
  Synthetic
ESDAERLIETLERLVKELEDHVRRSIRKLRELVEEMRDHSRRSDEELKKRLKEVEDRVR

SEQ ID NO: 23583 - protein, 59 aa, Artificial Sequence
  Synthetic
DVEEEIKRVVKKVEEELDKLLEDDERVVREVEEMLDRLLKKNEKVVRDAKRKLDDLRRK

SEQ ID NO: 23584 - protein, 59 aa, Artificial Sequence
  Synthetic
KDVVDKIIETLRRLVKEVAKEVKRSIDELKKTVEEVRKHSEETDRRIEKLAKEAEEEVR

SEQ ID NO: 23585 - protein, 59 aa, Artificial Sequence
  Synthetic
SVEEKIREVVERVRRMLEKLLEDNDRSVKEASKALDDLLRESRRVVEEVKKALDDLRRK

SEQ ID NO: 23586 - protein, 59 aa, Artificial Sequence
  Synthetic
ESEVRRIIRELEELVKRATDHVRRSDKRLRELVDELRKHIRKSIEDLKRLVDEARRRKD

SEQ ID NO: 23587 - protein, 61 aa, Artificial Sequence
  Synthetic
DEVEEIRKELEKLLEEVRRKLEKIIKDIRDLLREDKRKSERIDRELEKLLRRLEEIVRDRG

SEQ ID NO: 23588 - protein, 59 aa, Artificial Sequence
  Synthetic
EEMLREVKRVLEEVRRDIERLLEEIRKVVEEWRKRLEDLKKKNEDSAREVKRRIDELRK

SEQ ID NO: 23589 - protein, 61 aa, Artificial Sequence
  Synthetic
SEVEDIIRRLRELLERHREVSKRINDELRKLLREVEEDSRRLDKEIEDLLRRIREKVTRDG

SEQ ID NO: 23590 - protein, 59 aa, Artificial Sequence
  Synthetic
EDARRRVERVLREVEDTLRKLDKENEDSARRVKEALDRLLKKNEESIRRAEREIDELRR

SEQ ID NO: 23591 - protein, 61 aa, Artificial Sequence
  Synthetic
DDVEELKKEIKKLLDDHKKLSKELNEDIERLLREHRKLSEEIDRRLEKLLKELEELVRREG

SEQ ID NO: 23592 - protein, 59 aa, Artificial Sequence
  Synthetic
KELLDEVERVVREAKKTLDRVDEENKKSIEDAERELERMDRKNEKSVEDVRRTAKELLR

SEQ ID NO: 23593 - protein, 61 aa, Artificial Sequence
  Synthetic
SEAEEIIRRLEELLKKLKKDSDRLDEEIKRLLDENRRNSKDINRRLKKLLDDLRRLVRERG

SEQ ID NO: 23594 - protein, 59 aa, Artificial Sequence
  Synthetic
EDVLRRVEEALRRAEEDLKRLKEKNDRSLKEWRDTIRELKRENEESLRRVKEEADRLSK

SEQ ID NO: 23595 - protein, 61 aa, Artificial Sequence
  Synthetic
SDVERIIEELERLLEDLERRSKRIDEELKRAADRNRRNVEEIIRRLEDLLRRLEELVRRDG

SEQ ID NO: 23596 - protein, 59 aa, Artificial Sequence
  Synthetic
KDVLREVRRVAEKVRRSIKELKERNEKSLRDWKREVDKLLKDIKKVLDEVRKAADDLRK

SEQ ID NO: 23597 - protein, 61 aa, Artificial Sequence
  Synthetic
REVDEIRRRLEKEVERNRRNSKRIDDELKEMADRNRENVKRSIEEIKELLKRLKELVDRDG

SEQ ID NO: 23598 - protein, 59 aa, Artificial Sequence
  Synthetic
EDVRREVERVLKEWEDDVRRLLRKNEDSLREWREKLKKLVREHREVTKKAEEVLRELLR

SEQ ID NO: 23599 - protein, 61 aa, Artificial Sequence
  Synthetic
KDAEDIIRKLDELLDELAKAAREIIERLRDAARENEENSREINRRLEELLKRLEDAVRRDG

SEQ ID NO: 23600 - protein, 59 aa, Artificial Sequence
  Synthetic
EDVKRKVEEVARRVRKAIDDLLRDIKRVLDDWKRKVDKLLEDNRKSLEDVKREAERLRK

SEQ ID NO: 23601 - protein, 60 aa, Artificial Sequence
  Synthetic
SEVERLIKELEDVSRDIKREVTELKRDLKRLAEESKRLVEELEETIRKIVKDIEDTKRRG

SEQ ID NO: 23602 - protein, 59 aa, Artificial Sequence
  Synthetic
KELVDRVEEALRDHERTLRKVVKEVDKALKDLERDNTELVKRVKKVLDELRRDVEEKAK

SEQ ID NO: 23603 - protein, 60 aa, Artificial Sequence
  Synthetic
DMERKLDTVLEEVRRVVTRAKEANDRVLKDAKRVVEELSDRNRRVLEDAKRVVDELKEKR

SEQ ID NO: 23604 - protein, 59 aa, Artificial Sequence
  Synthetic
DEVVDKLLKKLKETLRRMEKESEELLRETEKILRELEKEVEDHLRTVEKTLEDLRREVE

SEQ ID NO: 23605 - protein, 57 aa, Artificial Sequence
  Synthetic
SEVDKILEDSKRKLEEVEEMVRRLLKKSRDLLEKLERDVERLIRDSERRLEEVARAK

SEQ ID NO: 23606 - protein, 59 aa, Artificial Sequence
  Synthetic
KDLRRKLKEVHDRSRRVIEKLREELEKVHDEARKVVEKITEKIERAHDKSRRLLEEIKR

SEQ ID NO: 23607 - protein, 56 aa, Artificial Sequence
  Synthetic
SEVDEFVKRSEDLLKKLEEDVRRIVRESERLLEEVERRVRKILRDLEKKLEDAERE

SEQ ID NO: 23608 - protein, 59 aa, Artificial Sequence
  Synthetic
KELRDKLEEAHRKVKEKVERLMEDLKRAHDESEKKIRDLKRKLREVLERLRKRVEEIKK

SEQ ID NO: 23609 - protein, 60 aa, Artificial Sequence
  Synthetic
DLEKRLEEAIRENRDTIRRLAKELERVIEDNKRRLEELKKEIKKVIEELERELRRVRKDG

SEQ ID NO: 23610 - protein, 59 aa, Artificial Sequence
  Synthetic
REIVDELVRRLKKHSDEARKTVEDLRRKSKKSLREAEETVKRLVEEIERLLEEIKETMR

SEQ ID NO: 23611 - protein, 60 aa, Artificial Sequence
  Synthetic
SEVDELVKKIEDSERRIEEKVKRIEDELKESEERIRTKVRELHKENEKLLEEIRRKKKDS

SEQ ID NO: 23612 - protein, 59 aa, Artificial Sequence
  Synthetic
DELRKTLKDALKRHEEVLKRVEERIRRVLKRHEEVLREAEERIRRSLEKLKRDADRVAK

SEQ ID NO: 23613 - protein, 59 aa, Artificial Sequence
  Synthetic
DEVEELVKELRDSLKRIREVAKELHDRNKELLDRIKRLVDELLKEIEKVLKEIEETKKD

SEQ ID NO: 23614 - protein, 59 aa, Artificial Sequence
  Synthetic
EEVRRKLEEAVREHERELERMAREIRKSLEDLKRVLEEVAERIKEVLRRLEKRVKEVED

SEQ ID NO: 23615 - protein, 60 aa, Artificial Sequence
  Synthetic
DEVEELVERLRRSLEKIRDRVRRLLERIKRLAEKIKRDIERLHKKNEDLAREMRKSERKS

SEQ ID NO: 23616 - protein, 59 aa, Artificial Sequence
  Synthetic
EELRKKLRKVVEDHKRVLEEVKDRLTKVLRELEEVLEKVKRDIKKSLEDLEKVLRELEK

SEQ ID NO: 23617 - protein, 59 aa, Artificial Sequence
  Synthetic
SDVERLLTKLKEVAKDLARIVKRLDEENEKLSEKAEREIRKLDRDNERLLEELEERKRR

SEQ ID NO: 23618 - protein, 59 aa, Artificial Sequence
  Synthetic
DRLRKKLKEVLDDLRRVLEELKDHIRRSLDKNRRSLEELEEHIRRSLTELRRRLEELAK

SEQ ID NO: 23619 - protein, 60 aa, Artificial Sequence
  Synthetic
DEVRELLERIEDEIRRIREEIKKLDEDNKKLAEDIRRKIEELDKENKELLKRIEDKKRES

SEQ ID NO: 23620 - protein, 59 aa, Artificial Sequence
  Synthetic
DEVRDRLRTILKKLREMLKEVKDRIDDSLRRLREVLDEVAKHIERSLKELKDRVREVEK

SEQ ID NO: 23621 - protein, 60 aa, Artificial Sequence
  Synthetic
SDKEEIKKVVDDVRRDIRRLEKELRDLNERFRKRVEELKKRLEEVNDRARREVERLKSRI

SEQ ID NO: 23622 - protein, 56 aa, Artificial Sequence
  Synthetic
VDTLKRRLEDVLRKAREEVEKWKEDLERLLREAERRVREYEEDTRRLLKELEDETR

SEQ ID NO: 23623 - protein, 56 aa, Artificial Sequence
  Synthetic
NVEDEVRRVVTELEKTLREVLKRSKEALDRLRETLERLLKELEDVHREANEDLTRL

SEQ ID NO: 23624 - protein, 59 aa, Artificial Sequence
  Synthetic
ESVVKRLVRELERLLREVEKHLEDSKRELEDLLRRLRERLEELKKRHEDLLREAREETR

SEQ ID NO: 23625 - protein, 57 aa, Artificial Sequence
  Synthetic
SLEETIEEVVRRNKETLDRARKKSEDVLRELERVLRELKRRTDEVARKLKEELDKLD

SEQ ID NO: 23626 - protein, 59 aa, Artificial Sequence
  Synthetic
EDVVRRLLEELERLSRDLERHVKRSEEEARDLLRKAREHVERSVKEIEDLLEDLKREAT

SEQ ID NO: 23627 - protein, 57 aa, Artificial Sequence
  Synthetic
SLEETVRKAVRRNRETLRRLKRESEEAVKEAKEVLDRLREETERVLRKLEKRLRELR

SEQ ID NO: 23628 - protein, 59 aa, Artificial Sequence
  Synthetic
KSMVDELLRTLEKLSDEIRRHVEKSKEDLERLLRELKKHVKRSVEEIEKLLEKLDKEAN

SEQ ID NO: 23629 - protein, 61 aa, Artificial Sequence
  Synthetic
SEVDEILKRIKEVLKRNKENVERIKKRIKEELDRNRKNVERILRTIEKLLKELEDIARREG

SEQ ID NO: 23630 - protein, 59 aa, Artificial Sequence
  Synthetic
EELRKKVKEVMDRWRETLDRLREEVERVLEDWRRKLEELRRRVEKVLRDAERVIKKVEE

SEQ ID NO: 23631 - protein, 57 aa, Artificial Sequence
  Synthetic
SEREEIERVLDENRRSLEELEREVEDALRTWEEELKKVEEAVRKVLEDVRRELEKDL

SEQ ID NO: 23632 - protein, 56 aa, Artificial Sequence
  Synthetic
VEKIKTEVDDLSRKLRETVERLKTELKKVIDRNRKTLEDLERRARKLIKEARDAAK

SEQ ID NO: 23633 - protein, 57 aa, Artificial Sequence
  Synthetic
REREKIEDLLRRNEKSLRDVARAVERILEEWRKVVEDLTERNKELLKEVEKVVRELL

SEQ ID NO: 23634 - protein, 56 aa, Artificial Sequence
  Synthetic
VDEIAKELKRLSDKLREMLKRLTDKAKRLIERNEKTSRDNERELRKLIKEAEDAAT

SEQ ID NO: 23635 - protein, 60 aa, Artificial Sequence
  Synthetic
SKEERLERLIEENKKSLDELSKRVEEVIKENKDVLKRLKEKIERLIEKNRRELERLKKDV

SEQ ID NO: 23636 - protein, 55 aa, Artificial Sequence
  Synthetic
EELERELRDHSRRLKEIVERIERKVREHIRELEKIVKEVEREVEEHIEKLERTVR

SEQ ID NO: 23637 - protein, 59 aa, Artificial Sequence
  Synthetic
SDEDRLRELLKKNRESLKRLSDEIRRLIEENRDALRRVKETIKELLRKLKEVVERVRKD

SEQ ID NO: 23638 - protein, 55 aa, Artificial Sequence
  Synthetic
EEVRKTLEEHSRDLRRKVEELAREVKRHIRELEKILKEVKDEIEEVIRRIEETAR

SEQ ID NO: 23639 - protein, 59 aa, Artificial Sequence
  Synthetic
SEIEDAAEKVRRNSEEAKRILDEHRERVKRVLEEIERLVKRAEERIEELIRTIERLRKD

SEQ ID NO: 23640 - protein, 59 aa, Artificial Sequence
  Synthetic
EEVRKKLEDILRKNEETSREIKKRLDRIDDDLRRVLEKAAKRLRDLLEKLREAVRRVET

SEQ ID NO: 23641 - protein, 59 aa, Artificial Sequence
  Synthetic
SEIEKVKKEVEENSREAKRIVDEHKRLVEENSKEMEKLLKEAEDTIRKLLKEIKELKDR

SEQ ID NO: 23642 - protein, 59 aa, Artificial Sequence
  Synthetic
ERMREKLRRALEENRRTSERLKRKLDDIDRDNERTSREVKEKLKRILEELKRTLEEVER

SEQ ID NO: 23643 - protein, 59 aa, Artificial Sequence
  Synthetic
SEIDKARDEVRKNSDEMRKIIERHREKVEDNSRRMKETVRRVEEEIERIIREIEELKKR

SEQ ID NO: 23644 - protein, 59 aa, Artificial Sequence
  Synthetic
RRLREELRRIAEENKKTSDDLKKRLDRIDKENERTSEELKEENDRLLEKLRRAADRVKR

SEQ ID NO: 23645 - protein, 59 aa, Artificial Sequence
  Synthetic
REIEEFEKDVRRNSEDMERIAREHEKLVRDLLRELKRLVDDLKRRLEELAEEIKSLREQ

SEQ ID NO: 23646 - protein, 59 aa, Artificial Sequence
  Synthetic
ERLRERLKRILDKNKETSDRIKKRLEDLNRELERVARELKKTIDELLRELEEVVERVRK

SEQ ID NO: 23647 - protein, 60 aa, Artificial Sequence
  Synthetic
SLEEEVKKLLEELKKVADKLTKEVREADKKLEEVLRRVKRRLDEVDRRLEEEIKKVKSRI

SEQ ID NO: 23648 - protein, 59 aa, Artificial Sequence
  Synthetic
EELLERLKRRIDRLIEEARRLVEKWRDELKKLIDEVRKLVEDHERKVRDIEKKVRDESR

SEQ ID NO: 23649 - protein, 59 aa, Artificial Sequence
  Synthetic
DAEEKARRVLEELDEALKRLAKKIKESIDKLKDVLRKLAEIIKRSLDELDEVLKRLASK

SEQ ID NO: 23650 - protein, 55 aa, Artificial Sequence
  Synthetic
EEILEELRRALEELKREVDELDRRNEEALERLKERVKRLNEDNRRTLERLEREVD

SEQ ID NO: 23651 - protein, 60 aa, Artificial Sequence
  Synthetic
DVEELLRRLLEELRRVVKEVEDINRRSLEEARRVLKRLEDDHRRVLKELEDVLERLRRQG

SEQ ID NO: 23652 - protein, 59 aa, Artificial Sequence
  Synthetic
RETIEELLRKVDRDLKRIRTTSEDLVRKNEELLEKLERESRRVVEESRKRLKEAEERTR

SEQ ID NO: 23653 - protein, 59 aa, Artificial Sequence
  Synthetic
SVEEKLKDLEKENKDSLDEIRKLNEDSLEEAKRVLKKLEDTHRTVLRKLEKVLDELRKR

SEQ ID NO: 23654 - protein, 59 aa, Artificial Sequence
  Synthetic
DDAIRKLRKKVEDTSRDLKRTSDDLVRRNRKLLKELEEESRKVVKESDEILRKMKEEVR

SEQ ID NO: 23655 - protein, 60 aa, Artificial Sequence
  Synthetic
SVEEKLDELEKRIKEVLERIERINEESLRRAEEVLRDLEETNRRALERVRDVLRRLEERG

SEQ ID NO: 23656 - protein, 59 aa, Artificial Sequence
  Synthetic
DDAIRKLLETVDRRLKELTETSKRLVEENRDLLRRAKEESKRLVDESEKVLEEMDRETR

SEQ ID NO: 23657 - protein, 59 aa, Artificial Sequence
  Synthetic
SADETLEELEKELRRVVDEVRRTNEEANKRLREVLRKLEKKNDDVLRDLERVLKELEDR

SEQ ID NO: 23658 - protein, 59 aa, Artificial Sequence
  Synthetic
EETIKKLREDVKRELDRIKTSSKKLVDDIERRLRRMEEESRKLAEDSRRILEEMRKEVT

SEQ ID NO: 23659 - protein, 56 aa, Artificial Sequence
  Synthetic
SEVEKLVDEIKKELKRLRETSKKLLDEIRELLERLKRSSKKLVDDIKRILEELKRR

SEQ ID NO: 23660 - protein, 56 aa, Artificial Sequence
  Synthetic
KDKLEKALRDARKVVEDIERTNREILKRVRDMVERIREDNDTVLEEVERMAEEVRK

SEQ ID NO: 23661 - protein, 61 aa, Artificial Sequence
  Synthetic
REIEELKKKVEKVLRELRKSSEEMKRRVEDLIRRLKKSSKDLERKVKDLLKKAEEKVRRDG

SEQ ID NO: 23662 - protein, 59 aa, Artificial Sequence
  Synthetic
EEARRRLEEVVRRLRKVLDDVRKINKEVVDRLKKALDEVKRTNEDVVRDLRKVLEELKT

SEQ ID NO: 23663 - protein, 59 aa, Artificial Sequence
  Synthetic
SEIEKLKEEIRRLLEEIKRHAEENKRRVETALRDIERHVEENTRRVAKVEEEIKKLKDR

SEQ ID NO: 23664 - protein, 56 aa, Artificial Sequence
  Synthetic
KDELDKVEEEAKRVAEEVKEIHDRVLEEVRRVVDRVLKAHDEVLRRLERVVREVKR

SEQ ID NO: 23665 - protein, 60 aa, Artificial Sequence
  Synthetic
EEEKRLRELEKRNEDVIRKAAEDVREILRKNEEVLKEAEDRIKRLIDEDRRVLEEVKRDD

SEQ ID NO: 23666 - protein, 55 aa, Artificial Sequence
  Synthetic
EELEREVRKHDKEVKEVIDRLREKSERHIREIERIVDELRKKHEATVRKLKKDVK

SEQ ID NO: 23667 - protein, 60 aa, Artificial Sequence
  Synthetic
DEDETLRELEKKNDKALDDARRTIEEVIRRNEEVLKRAAEEIEKLERKNKRVLEEVKRRD

SEQ ID NO: 23668 - protein, 55 aa, Artificial Sequence
  Synthetic
EELAEEVKRHDDRVRKEIEKLKREVEKHDREVKETIDRLAKKVDDHLKELRDTTR

SEQ ID NO: 23669 - protein, 59 aa, Artificial Sequence
  Synthetic
DEIKEIEETVERLVEELKRIVEEWREESKRNVDELEKRIRDIKRRIDEAIKTLEELKRR

SEQ ID NO: 23670 - protein, 60 aa, Artificial Sequence
  Synthetic
VEELRRALDELLEKARKVVEEVEKMIKEVNDRNKKVVDELKRTLDKILKDLEEVAREVDR

SEQ ID NO: 23671 - protein, 59 aa, Artificial Sequence
  Synthetic
SEIEKMKRDSDENIKRMEEIARKWEKESRDNIREIEKRVEDLKRRIEKVIREIEKLRRD

SEQ ID NO: 23672 - protein, 60 aa, Artificial Sequence
  Synthetic
LEEAKRKLEEVLDKNRRVVEKVERRIDRINDRNREVLERAEKELDDILRKLEEVVRRAEK

SEQ ID NO: 23673 - protein, 61 aa, Artificial Sequence
  Synthetic
DEIREAKKRLDDIVTELRDHIRRSKERHERLVKELERHIRELEKKVRELIKRLDDAVRRDG

SEQ ID NO: 23674 - protein, 59 aa, Artificial Sequence
  Synthetic
EEVKREITRLLEDLKRVSREHREEIRKLLETTREVSKRHREKVEDLLRKLEEVLERVRT

SEQ ID NO: 23675 - protein, 56 aa, Artificial Sequence
  Synthetic
SELEEIARLAEEIERKLRESLRESDKMHKKLNKENEDLLEKIRKEVEDIIKKLRDL

SEQ ID NO: 23676 - protein, 59 aa, Artificial Sequence
  Synthetic
ERVEEAVRRVVEKIKDVVEKHSDASRRLNEELKESVDRLRREVEKLVEKIRKVVEDLRK

SEQ ID NO: 23677 - protein, 60 aa, Artificial Sequence
  Synthetic
SDLERVEKESRDHIDTLRRIVERVEEHVRRSIKTLDELVDRARRSVERLIEELEEMKRKD

SEQ ID NO: 23678 - protein, 59 aa, Artificial Sequence
  Synthetic
RRVEEELRRLLEENRRVVEEVEKELDRLLKESEDAVRRVEEALDRLLKELERVAKEVKD

SEQ ID NO: 23679 - protein, 60 aa, Artificial Sequence
  Synthetic
SDLEKVKKDSDDHIRELERLVRRAEEHVRDSVRRLREIVEELDRDVRRLIEELKDLKRKI

SEQ ID NO: 23680 - protein, 59 aa, Artificial Sequence
  Synthetic
EDVKKKLDDLLRENREAVKRVERALDKLLTDDRRVVEEVERALDELLKRIEKVAREVEK

SEQ ID NO: 23681 - protein, 60 aa, Artificial Sequence
  Synthetic
RDVDELRKESEDHIRELRKLVEDVRRHVKRTNDDLERLVKEVDDTLKELIKEVKELKRRV

SEQ ID NO: 23682 - protein, 59 aa, Artificial Sequence
  Synthetic
EDVKKKIKDLLDTNREVVERVLRTLRDLLRRNKEVIDRILETLDELLERVKREIEKDAK

SEQ ID NO: 23683 - protein, 60 aa, Artificial Sequence
  Synthetic
DDAERAKEESERHIKRLKDLVEELRKHSERTDEEIKELLRRLEKTVRDLIRELERLKEEI

SEQ ID NO: 23684 - protein, 59 aa, Artificial Sequence
  Synthetic
EDVKRKLDKLLKENEDVVREVDRALKELLRKNAEMLERAKERLDRLLEEVKKVADEVRR

SEQ ID NO: 23685 - protein, 60 aa, Artificial Sequence
  Synthetic
SIEEELERLLRKNEDSLRRVRDEIRRLEEEIRRVLKKWRDEARKLLREIERVLKEVAERK

SEQ ID NO: 23686 - protein, 59 aa, Artificial Sequence
  Synthetic
ETLLRDLERKSKEVDERLEELLRRAKERVEELIREIEALLDRNRRNVERLIRELERRTD

SEQ ID NO: 23687 - protein, 61 aa, Artificial Sequence
  Synthetic
EELERLLEDVKRTLKELRDRAKEVLDRVRKTLEELKRELKRVLDEVTELLERLRRIVKREG

SEQ ID NO: 23688 - protein, 56 aa, Artificial Sequence
  Synthetic
KRIIKEARERVETVNRETKKILEEIARTVEKVDEESRRILEKVKRDAERVLREIKK

SEQ ID NO: 23689 - protein, 60 aa, Artificial Sequence
  Synthetic
DELEEVEKEVKRILEESRRLLEELEREVRELLERSKRILEELEEEVRRLLEKLKRVRTRG

SEQ ID NO: 23690 - protein, 55 aa, Artificial Sequence
  Synthetic
EELERLKRELDKVHEEVREKVERAKRELERVHKRSEEEARRLKEEVDKVLDELRK

SEQ ID NO: 23691 - protein, 59 aa, Artificial Sequence
  Synthetic
SELDELRKRVEEIVEENDRVLRELEKRVRELSERNKKTLKELTKRVREILERLKELKDR

SEQ ID NO: 23692 - protein, 59 aa, Artificial Sequence
  Synthetic
EEVKEVVRRLEEKVKESLDRAEKVLRRLEREARESNRRHEEEVRRLKEEIDRVVTELRR

SEQ ID NO: 23693 - protein, 58 aa, Artificial Sequence
  Synthetic
SLEDVLREVEERIRKSLEEHRKVTDEAEKELRRIVEDHKRVLEEVKKEIEDVIKELKK

SEQ ID NO: 23694 - protein, 60 aa, Artificial Sequence
  Synthetic
KEKVAREIRETVKKLHEDNRRMSEEIKKTVERLLDKLRRSLERIRREAKDLVRKIEDLRR

SEQ ID NO: 23695 - protein, 58 aa, Artificial Sequence
  Synthetic
KLEEVLRKVAEDIKRSLEDLKRVLKEVADHIRRSLEELRRVLERVKKEIEDVLRELEN

SEQ ID NO: 23696 - protein, 60 aa, Artificial Sequence
  Synthetic
ADKVAEDIRRDVRRLDEENRELAERIKRAIEELDRKNKDLARRIEDAVRRLLEKIKEAVR

SEQ ID NO: 23697 - protein, 58 aa, Artificial Sequence
  Synthetic
DLEEVLKEVEKRIRDSLKDLKRVLDEVLDHIRRSLKENRDSLRKLEEDLRRVLEELRR

SEQ ID NO: 23698 - protein, 60 aa, Artificial Sequence
  Synthetic
EKKVAEKIRKEVKELDEKNKELARRIRDVAKKLDERNKDVSRRLAEEVERLLRKIKEKVR

SEQ ID NO: 23699 - protein, 58 aa, Artificial Sequence
  Synthetic
DLERVLEKVARDIEESLRRNKESLKRLKEHVEESLKENRKSLEDLRKKLKDVLDELKK

SEQ ID NO: 23700 - protein, 60 aa, Artificial Sequence
  Synthetic
KKKVADKIREEAKRLDKENREASDRARDVVRRLDEKNKKLSEEMKRTVERLLETLDRKMR

SEQ ID NO: 23701 - protein, 58 aa, Artificial Sequence
  Synthetic
DLERFLEEVARKIEKSLEELRRVLEEVRDRIRRSLEENTKSLERLTEEVRRVLERLKD

SEQ ID NO: 23702 - protein, 60 aa, Artificial Sequence
  Synthetic
EDKVAKEIEDEVRRLDEKNRKLAKEIRDEIRKLDKENKDLSKELRDRVEELLRKIEETVR

SEQ ID NO: 23703 - protein, 59 aa, Artificial Sequence
  Synthetic
KAAEEIRKKVEDYKRESEKILEEVEDHSRRSKETLKRLLDDLRRAVEELKRRLEELKRR

SEQ ID NO: 23704 - protein, 56 aa, Artificial Sequence
  Synthetic
REVADELKKRLKRANEESERVLRELAERNKTALEEAERVLRRLKEEIEKVLRKLKK

SEQ ID NO: 23705 - protein, 59 aa, Artificial Sequence
  Synthetic
SEVEDLRRRVEEIKRRVEEILRENKEVSEKSIRELERLLEELKRLVDELLKRLEELKRE

SEQ ID NO: 23706 - protein, 59 aa, Artificial Sequence
  Synthetic
DDLRRALKDVVDEVKKVVDELREENDRLRKENKRAVDEVRKELERLLRDVERVIRRAEK

SEQ ID NO: 23707 - protein, 59 aa, Artificial Sequence
  Synthetic
EELDRLRRHADESRKRAEEILKRNEEEIRRLVEELKRILKTNEDVLRDLEKKLEDLKRR

SEQ ID NO: 23708 - protein, 59 aa, Artificial Sequence
  Synthetic
DKLRTTIDEVRRRSKKVLDDLRDRNRRLLEEVDRAIKEVRETNEELLRRLKRVIDEVRR

SEQ ID NO: 23709 - protein, 59 aa, Artificial Sequence
  Synthetic
SAEELLRTIEKRIEDNHRRLEEILEEIARLIEDMLRTDERIVREIKELLKEVLDRVRRA

SEQ ID NO: 23710 - protein, 59 aa, Artificial Sequence
  Synthetic
EEVVKKLVEDVERELERSLREAEDLLRRVEEVIRTSKKESKDVLEKIERLLRDLERRTR

SEQ ID NO: 23711 - protein, 59 aa, Artificial Sequence
  Synthetic
SVAEELKKEVDDLLRDLKKKLDDVRRDHERLLRELEEHLERSRERVERLLRTLEDVARK

SEQ ID NO: 23712 - protein, 56 aa, Artificial Sequence
  Synthetic
RKVIEKIERDIRKILKEVEEVLRTLKKKSDEILERAKRVTEKIERDVTEILERIKK

SEQ ID NO: 23713 - protein, 59 aa, Artificial Sequence
  Synthetic
SVADELRKTAEELLKRLREHLDTSRRRVEDLLRRNEKKLRDVLREVKKLLDELRELKER

SEQ ID NO: 23714 - protein, 56 aa, Artificial Sequence
  Synthetic
EDVIREIKDRVRRILDEARRVSEKLRRDVEKINRESREVLERIKELIKRILKEAKD

SEQ ID NO: 23715 - protein, 57 aa, Artificial Sequence
  Synthetic
SELEELLREVDDSLKKLETEAKKLLDEVRDSLRKLEETLRRVLREVEEELKELEKEN

SEQ ID NO: 23716 - protein, 59 aa, Artificial Sequence
  Synthetic
KRVEDVLREIRRRAREINERLKKILKEAKEVAEKVNEETRRVLKEIKELIERVLRELRK

SEQ ID NO: 23717 - protein, 60 aa, Artificial Sequence
  Synthetic
REAEEAKEEVEELNRRNKKELDDARRRVDELDKRNKDRLKESSDRVKRLVEELERVKEEG

SEQ ID NO: 23718 - protein, 56 aa, Artificial Sequence
  Synthetic
KDVLKRLAELIKESIRELERVLEELAEKIDRSLKELDDVLRKNETDLKRVIEDLKR

SEQ ID NO: 23719 - protein, 60 aa, Artificial Sequence
  Synthetic
DEAEKAKRDSEKVVEDNRKMLEDSTRRAERLNEENKKELKKSTEEAEKILREIDETKRRG

SEQ ID NO: 23720 - protein, 56 aa, Artificial Sequence
  Synthetic
DEVLKRLKEEHRRLIEELEEVLRRNEEIIRRSIEDLERVLDRNRRELEDVIRRLKE

SEQ ID NO: 23721 - protein, 60 aa, Artificial Sequence
  Synthetic
REAEEVERKVEELNRRNRKVLDDARKESEEVVRRNREFLRRLEERVRTILRELDKRKRDG

SEQ ID NO: 23722 - protein, 56 aa, Artificial Sequence
  Synthetic
DEVLRRLAEDIERSIRELEKVLRELERIHRELIKELKEVLKRLEKDAKEVIERLRT

SEQ ID NO: 23723 - protein, 61 aa, Artificial Sequence
  Synthetic
SLAEEIDKTIRELAKRHEKTVEDIKKIITELEKKHRDTAEELERIVREIEKKIRELKKRLK

SEQ ID NO: 23724 - protein, 59 aa, Artificial Sequence
  Synthetic
EELERVLREAEETLRRLIEKDEKVNREADEKSERLIREDEKVLEDVAREVERLLRELDK

SEQ ID NO: 23725 - protein, 61 aa, Artificial Sequence
  Synthetic
DEDREARELVERLREEHRRTAEEIKKIIEDLERKHRETMERLKRIIEKIERDIRRLKRDLK

SEQ ID NO: 23726 - protein, 59 aa, Artificial Sequence
  Synthetic
KELERVLEKVARDLKKLVDDDRRVNETANRRSRKLIEDDKRVLEEAAKEVKRLLDELDK

SEQ ID NO: 23727 - protein, 56 aa, Artificial Sequence
  Synthetic
DTERTVKEKIRKWKEDVERVERRLEELVDRARKLSKENVDRMRELVRRLEDRVRKD

SEQ ID NO: 23728 - protein, 56 aa, Artificial Sequence
  Synthetic
REVLEDARRKIDELNERVERVAETVRRKLDKILEDNKRVVERVKEEIRRVLEELER

SEQ ID NO: 23729 - protein, 59 aa, Artificial Sequence
  Synthetic
SEEEVLREAAKTVEKLLDEIRRSLEKVSKRVEDSNRELKESLDRVRERVRELLEELRKN

SEQ ID NO: 23730 - protein, 56 aa, Artificial Sequence
  Synthetic
KDDVERTLREIAKLVDEVDKENKRALRENEERVKTLNRENEEMLKRIEEEVRRATK

SEQ ID NO: 23731 - protein, 59 aa, Artificial Sequence
  Synthetic
DLEEVAKEVKKALDELLKRNEDSARRVKEAIRELLKRINDVTREVEETLDRLLKEVEDG

SEQ ID NO: 23732 - protein, 60 aa, Artificial Sequence
  Synthetic
AERVVKRLEELLREAAEHSKRSNDELERLLDRLRREVERYERELEKRKKEAKELADKLRK

SEQ ID NO: 23733 - protein, 59 aa, Artificial Sequence
  Synthetic
DLERRLDELLKRIEDRVRELVRTLEESLRELERRVREIIRRLEEHLRRIEKMVRDLKRA

SEQ ID NO: 23734 - protein, 56 aa, Artificial Sequence
  Synthetic
ERVIKKAEEDVRRLLREIEEVSERHKREVDRLEREIEEVSREHKERVEKLLREIER

SEQ ID NO: 23735 - protein, 59 aa, Artificial Sequence
  Synthetic
KLEEDLKRILDELRRMAKEIIDRLEDHLRKIKKDVDKLSKENKDHLKEIEDTVRELKRN

SEQ ID NO: 23736 - protein, 56 aa, Artificial Sequence
  Synthetic
ERVIKRVDEEVKKLAEEIRKVSEEHEKRVKKLLKEIEKSSEDHRRRVEELLREIDR

SEQ ID NO: 23737 - protein, 59 aa, Artificial Sequence
  Synthetic
SEEEEVEEELERHHRDVEEYVKRLKELLDKLRRKNETTVRDIARLAKKHHDDVDELKKR

SEQ ID NO: 23738 - protein, 55 aa, Artificial Sequence
  Synthetic
REVLKRFKDKVKENRDESERVHREIKERLEELKRKNEDVLRKVKKILDDNEERLR

SEQ ID NO: 23739 - protein, 57 aa, Artificial Sequence
  Synthetic
KDLEKLVEDIRRLLEELKKTVEDNKREIKELLDRLREKVKENLKRHKELNKRLRDTG

SEQ ID NO: 23740 - protein, 59 aa, Artificial Sequence
  Synthetic
KEVKDRIEEVLRELREAVRRHHEKVKEVLRELKEALDKHHKDVTDSLRDVERLVEEARR

SEQ ID NO: 23741 - protein, 58 aa, Artificial Sequence
  Synthetic
SEKEILDEIRDRIRKLLEEIKDYLEKSKKKIRDLLEKIKKVLEDNKERVDRLLDVIRK

SEQ ID NO: 23742 - protein, 55 aa, Artificial Sequence
  Synthetic
DDVRREAKRLLEEVAEAVRRIHETSKRLLERVDEEMKRVEETIRKTNKEVEDAKR

SEQ ID NO: 23743 - protein, 57 aa, Artificial Sequence
  Synthetic
SDVEKLIRDAEKKMDDFRKDSERLVRELEEKLKRHEERVRDLLRELKELLEEVRRKD

SEQ ID NO: 23744 - protein, 55 aa, Artificial Sequence
  Synthetic
EKIKEAVDRIKKALRDSHKELAEVVERIKRKLDETNRELKDEARKIKEELRRVEK

SEQ ID NO: 23745 - protein, 60 aa, Artificial Sequence
  Synthetic
SEVETVKKRLEDSTKESEDTVRKVKRELERLIERSEDTLRRIKKRLDDLIRTIEDLKRRG

SEQ ID NO: 23746 - protein, 59 aa, Artificial Sequence
  Synthetic
KELLDTLRRLLEENKRRHKETVDEIERLIKEVERANREILTRIKKALDDVRRAVEEIKR

SEQ ID NO: 23747 - protein, 60 aa, Artificial Sequence
  Synthetic
REVEEVLRKVREDSKRNKDELKRLLDEARKESEDNKRDLEKLLKEVREEVRRVEEILRKT

SEQ ID NO: 23748 - protein, 55 aa, Artificial Sequence
  Synthetic
EDVLREIETLLDKNHKDNKKVLDDIRELLKENADRNRRVLEEIKKLVEDVERKVK

SEQ ID NO: 23749 - protein, 58 aa, Artificial Sequence
  Synthetic
DEDEKALREIKKLIEDNERLNREVNERIERLIDRARRLMERVNREIERLIKEVRERLG

SEQ ID NO: 23750 - protein, 58 aa, Artificial Sequence
  Synthetic
EELEKTLRDIRKRSKEDADKVKKSLEEVEEEIRRIEKRLRESLKKVEDDIERIRREAT

SEQ ID NO: 23751 - protein, 56 aa, Artificial Sequence
  Synthetic
SEIEKLTKEIRDLIRTSREEIKKLMEELERNVREAEESIKRLLEKAEELIRRIAEE

SEQ ID NO: 23752 - protein, 56 aa, Artificial Sequence
  Synthetic
KEDVKRELERIKKSSDDVRKKVEDESRKHREEVERLERELDRKLEDIRRKVEETKT

SEQ ID NO: 23753 - protein, 61 aa, Artificial Sequence
  Synthetic
SEIEKLAEDVERIAKKIEDVVRELRKANEDIIKEVRDINKELRDKVEEILRRIEKIVRDRL

SEQ ID NO: 23754 - protein, 59 aa, Artificial Sequence
  Synthetic
KEILDRIRKKLRETLERVRDRLRKYLEDLERRLEELRREHRKTLEELKEKLKRLADRVK

SEQ ID NO: 23755 - protein, 57 aa, Artificial Sequence
  Synthetic
SEVEDLERRAREVNKRIKDLIDRLRERVRKIEEDIRRLNKELKEEVDKIIEEIRKDG

SEQ ID NO: 23756 - protein, 58 aa, Artificial Sequence
  Synthetic
KLIEELLREHEKMLKEIEDRIRKIERELDELLKTLEDKHREILDELEKELRKAKERRR

SEQ ID NO: 23757 - protein, 60 aa, Artificial Sequence
  Synthetic
SDIERILEENEKTNRENRKRIEDIRRELEERLDRNRRRIEEILRRAEKMLEEIEDIFRRS

SEQ ID NO: 23758 - protein, 59 aa, Artificial Sequence
  Synthetic
EDKLRDLKKKLRDSLRTLEELHRKLKKDLDEILRRLEELHRKLKEDLDRILKAVRDTAK

SEQ ID NO: 23759 - protein, 60 aa, Artificial Sequence
  Synthetic
SEIEDIKRRNEENNRRNKKRIDDILEELKRRVEENRRRLEDIERKLREDKERLKDIFRRS

SEQ ID NO: 23760 - protein, 59 aa, Artificial Sequence
  Synthetic
EDKLRKLEEDLRRSLETLREIHRKLKEELDRILEELKRLHERLKRRLDEIADEVARTAR

SEQ ID NO: 23761 - protein, 60 aa, Artificial Sequence
  Synthetic
SDIEEIERRNRENNERNKRRIEEIEKRNREENKENEKDIERILRRAEELLKRAKEILRES

SEQ ID NO: 23762 - protein, 59 aa, Artificial Sequence
  Synthetic
EKKLRELKKKLDDSLRTLEELHRELMKRLDESLKTLKELHDELKERLDRILKEIRDDAK

SEQ ID NO: 23763 - protein, 60 aa, Artificial Sequence
  Synthetic
SELEKTLEDLKRHSEENKKKLEEDLRDMERNLKENKDRLKKILEEAEKTLKDLERRFREG

SEQ ID NO: 23764 - protein, 59 aa, Artificial Sequence
  Synthetic
KDKAEELERRLDELVKENREIHERVKKALDDIVKELEELHERLKRRLEEILRRIAETVR

SEQ ID NO: 23765 - protein, 57 aa, Artificial Sequence
  Synthetic
SSVERFEKAVKESIENIRRLLEELEREIRESMKHLRELVKELKEALDRIVERLRRTV

SEQ ID NO: 23766 - protein, 55 aa, Artificial Sequence
  Synthetic
EEDLKRLDKENKDIEKKIRDLVKEARDENRKLKRDIERTLRELEERLKEVEDRET

SEQ ID NO: 23767 - protein, 57 aa, Artificial Sequence
  Synthetic
SDIEKRLEENERHNERSEERIRELLKELEDHLRRTKREIEKKLEDLKRLLDRLREED

SEQ ID NO: 23768 - protein, 58 aa, Artificial Sequence
  Synthetic
EELKRVKDELDKSLKHSRELIERAKERLEEIKKRSKELVDRAEKRLDEILKEVKDDFD

SEQ ID NO: 23769 - protein, 57 aa, Artificial Sequence
  Synthetic
DEIKEREDDVKRHLDRTREEIEKLLKEMEEHTERSRRKIKKVAEDAEERLRKVEEEN

SEQ ID NO: 23770 - protein, 58 aa, Artificial Sequence
  Synthetic
KELEEVKRKLDRILEESEKLVREAEKRLDELLKDNKRLVEELEKELDRILEELRKRVD

SEQ ID NO: 23771 - protein, 57 aa, Artificial Sequence
  Synthetic
DSIEDLERRAKESDDHLEKLIRELRDELRRSLETVRRNIEDLRRTLEEVLRRLEEDG

SEQ ID NO: 23772 - protein, 59 aa, Artificial Sequence
  Synthetic
EEMLREIKKELEETNKRAEDDVRKIREELREHNERHKERSKRIKEELKRTLDELKKKRK

SEQ ID NO: 23773 - protein, 60 aa, Artificial Sequence
  Synthetic
SRIETLVRRMKELLKEVEDKSEKSKRRWEDRLKKVAEDSKRRVEEMDRELDEVRRKRERG

SEQ ID NO: 23774 - protein, 59 aa, Artificial Sequence
  Synthetic
ERLLRELKRIVDEVKKELDRLDTEHNKAIEDVKRELRKLDEEVRRIVERVKRELDRLEK

SEQ ID NO: 23775 - protein, 60 aa, Artificial Sequence
  Synthetic
SEIEDLIRRIRETLKRVEEDSRRSKEEAKRKLDKVKEDSERLVEKMRRDLEKVKRETDKG

SEQ ID NO: 23776 - protein, 59 aa, Artificial Sequence
  Synthetic
EELLKRLKEVVEDVIRKLDRLDKEHTEIVEEVERRLDKLDKDVERIVEEVKKALDETEK

SEQ ID NO: 23777 - protein, 60 aa, Artificial Sequence
  Synthetic
SEIEKLIEDIRRRLKKLEDESRKSVKDARDMLRRVEERSRDSVRKMREELERVEDESRRG

SEQ ID NO: 23778 - protein, 59 aa, Artificial Sequence
  Synthetic
DELLKRLEDVVRDVKRKLDELDERHTRIVEDVKRRLDDLDREHRKIVEEVKKELDKLLK

SEQ ID NO: 23779 - protein, 60 aa, Artificial Sequence
  Synthetic
SEIEKLIEELRRELEKVKDELERSIEEMDRELDDVRRDSKRLVDEIKRELREVTERTKRG

SEQ ID NO: 23780 - protein, 59 aa, Artificial Sequence
  Synthetic
EELLKRLEEVAEDVKRALEELLKKHTRVVERVEKALDELDKELERIVREAEKELDRREK

SEQ ID NO: 23781 - protein, 60 aa, Artificial Sequence
  Synthetic
SEVEEEEKTAEKILEEVAEEIKESIKRIREEVKKNEDDSERSVREMERRLREVEERIRRG

SEQ ID NO: 23782 - protein, 59 aa, Artificial Sequence
  Synthetic
EELLRRLKRVVERVKERLDRLLEEHTRVVEEAKERHRELDERHEKIVRDVVRELDRRVK

SEQ ID NO: 23783 - protein, 60 aa, Artificial Sequence
  Synthetic
SEVEKVVKELEDELRRVAEDSERSIREMEKRLDDFRKRVRETAEKMKEDLRRVEERARRG

SEQ ID NO: 23784 - protein, 59 aa, Artificial Sequence
  Synthetic
ERILKRVEDIVRRVEEELDKLDEKHTRVVKKVSDALDRIVEELEKIVREVAKRLEDLRK

SEQ ID NO: 23785 - protein, 60 aa, Artificial Sequence
  Synthetic
SEVEKKIEEMRRTLDEARRRSEESKREIKKELDEARKRVEESLKRLRETLKKVEDERRRG

SEQ ID NO: 23786 - protein, 59 aa, Artificial Sequence
  Synthetic
ERLLRRVAKVVEDVKRELDRLDEDHTRAVEEVERALDDLLKKHEDVVREVKTELEKLLK

SEQ ID NO: 23787 - protein, 57 aa, Artificial Sequence
  Synthetic
SELEELIRDIERKLEKVKRDSERSMREIEEDLKRVRKKTEESERRIRDLLDKVRKRK

SEQ ID NO: 23788 - protein, 56 aa, Artificial Sequence
  Synthetic
TEDLRRVAKRVEEELDRSNEEHSKIVDKAKRDLDKSNKEHSKVVEDAERTLDRVED

SEQ ID NO: 23789 - protein, 57 aa, Artificial Sequence
  Synthetic
SELEELEERIERLLEKVRRESEKLLRELEKKLKDVERKIEDSIRKIRDDLRKVRERK

SEQ ID NO: 23790 - protein, 56 aa, Artificial Sequence
  Synthetic
TEDLRRVLDRVKKDLDRSNEEVRREADRIMKELDKLLKKHSDVVKEVLEALDDTDR

SEQ ID NO: 23791 - protein, 60 aa, Artificial Sequence
  Synthetic
SEIEEIKRRLEETNKRVREKNKRSVDRIKEHLERSRRRVEEIIRRIEKLLEELEEKARRT

SEQ ID NO: 23792 - protein, 59 aa, Artificial Sequence
  Synthetic
EKLLRDLEKALRDSIRTLKRSVEENDRINKEANEDSERLLRELKKVLEKAKKDVDELRR

SEQ ID NO: 23793 - protein, 60 aa, Artificial Sequence
  Synthetic
SLEEELRELARRLKEEVRKLEETLEKVLEDSARNIKRLIDDLKRVNDELRKRVDDLIREV

SEQ ID NO: 23794 - protein, 59 aa, Artificial Sequence
  Synthetic
KEALDRVRKKLEDALKKLRDEVREMKKKNDKTNKEVKDKADELRKKHEDTLEELKKRVK

SEQ ID NO: 23795 - protein, 57 aa, Artificial Sequence
  Synthetic
SEVDEIIKRIEDLLKEVRDESKRNEDRIREKLKRLKKKSEDNAEKIKDELKKIRDRK

SEQ ID NO: 23796 - protein, 59 aa, Artificial Sequence
  Synthetic
KEVLDTLRDAIRRVKEELDRNLEKNTELIKRVKETLDDLLRRNKELIRKAEETLDEERR

SEQ ID NO: 23797 - protein, 61 aa, Artificial Sequence
  Synthetic
DELEKIRKELEDLSRENKEKLERIARELKRLSEENTETLEKLKEEIRRLLEKLKRIVEKDG

SEQ ID NO: 23798 - protein, 59 aa, Artificial Sequence
  Synthetic
KEMLDRIKELLDTHRRILEDIKREIDKLLEDHRRRLEELLRDLKRALDRVREEVDRLRR

SEQ ID NO: 23799 - protein, 57 aa, Artificial Sequence
  Synthetic
DDVRRIEEEIRRTLRELRETLKRVERRNREENEDLKDKMRRMKKENEDTNERVKKEG

SEQ ID NO: 23800 - protein, 56 aa, Artificial Sequence
  Synthetic
KERLDKLLEDLAKEARKVIEDLKEILRRTKESIDEVEKTLREILKKSKETADRVET

SEQ ID NO: 23801 - protein, 57 aa, Artificial Sequence
  Synthetic
SDLERLKKRNDDANRKLKETLDRVEKENRDVNRKLEKELKEVEEKNRRENKKVRDRG

SEQ ID NO: 23802 - protein, 56 aa, Artificial Sequence
  Synthetic
KEELDKILTRSEEVARRIIEELKKILEETRKSAERVIRRLEEILKESEREVREVET

SEQ ID NO: 23803 - protein, 57 aa, Artificial Sequence
  Synthetic
SEVEETIKRVRDTLKKHNEESEKAIRELEEELKRLDDKNREAVEDVKRTLDELRRTK

SEQ ID NO: 23804 - protein, 59 aa, Artificial Sequence
  Synthetic
KDLRKRLEELLREVEEDLKRNIEKLDKALKEAKEVIERSIEHLRRVLEEVERVLRELAR

SEQ ID NO: 23805 - protein, 60 aa, Artificial Sequence
  Synthetic
RKEDEMRKLLDEIEKDLKRNDERVRRVLKRSKENLRRLEERAEKLLETVEREIKRLEEEG

SEQ ID NO: 23806 - protein, 59 aa, Artificial Sequence
  Synthetic
EREVKRTIDELKDELRKHNDKTEKLIRRARETDKELNDRVAKREEEARRELEEVDRRVR

SEQ ID NO: 23807 - protein, 60 aa, Artificial Sequence
  Synthetic
SLEEAVEKLLRDSEENLKKNEEDVRRLLKKSKENADRLRDEVRKLLETAEREIKRLEDEG

SEQ ID NO: 23808 - protein, 59 aa, Artificial Sequence
  Synthetic
ERLIRETEKDVKRRDEEHNTRTEREIREAKKEDEKLNKEVRDTEKRLRDELRRVEERVR

SEQ ID NO: 23809 - protein, 60 aa, Artificial Sequence
  Synthetic
SKEDKVRELLRRSKENLDRVREEVRKLLKKSRDTLEELRERAKRLLEEVEEVIKRLEEEG

SEQ ID NO: 23810 - protein, 59 aa, Artificial Sequence
  Synthetic
EKEIEETIRRVEDMDRRLNERLRKKIEDAERMDEALRERVERLIRRVRKELEDVERRVR

SEQ ID NO: 23811 - protein, 56 aa, Artificial Sequence
  Synthetic
SELEEVARRIEKMIRDLEKDLRELERKVRESDERLKRDLERNEKEHRDTIEAMRRR

SEQ ID NO: 23812 - protein, 59 aa, Artificial Sequence
  Synthetic
KDVRDALKKLLDELKKAVEDVRREIERLIREHKRVTEEVERADKELNDRTRKAADELRR

SEQ ID NO: 23813 - protein, 57 aa, Artificial Sequence
  Synthetic
EEVERLEEEVRRRKKEWEDRLEEVKRRNEKAKRESERENEKIAREVREVVKELRERG

SEQ ID NO: 23814 - protein, 56 aa, Artificial Sequence
  Synthetic
KRRLEELLRDHSRMIRRVEAELDKSLEDHKRALDENEKRIDEWLERLRKIVEEVEK

SEQ ID NO: 23815 - protein, 56 aa, Artificial Sequence
  Synthetic
SKIEEIERRVRELEETWRRKLEEVEKDSRRSVKKMEEDLERAARETEEIKRRLREE

SEQ ID NO: 23816 - protein, 56 aa, Artificial Sequence
  Synthetic
ERKLEELLRKHNEVIKRVKEELKRLDKEHTDIVEEVKKELDKLDEDLKRVADEKRK

SEQ ID NO: 23817 - protein, 57 aa, Artificial Sequence
  Synthetic
DEDEDLERLLRKLKRVLDEIRKRIRENIEENREVVERAAREVKKSIDENRKVVDDVQ

SEQ ID NO: 23818 - protein, 56 aa, Artificial Sequence
  Synthetic
GEEVRKKIEDLERELRRTLEEIHKENEKSKRKIEKALRDIREENKKHIREIEETKR

SEQ ID NO: 23819 - protein, 60 aa, Artificial Sequence
  Synthetic
SDIETLTRDVERSIKELEDHLKKHHEEVKERIRRLEEHADELRRRAEKLKEELKRMKDRG

SEQ ID NO: 23820 - protein, 58 aa, Artificial Sequence
  Synthetic
KVEEDVKRLVKKLDEVNERHRREIERNRKELEDVSRRHKEKVDRILEDIKEALDRVRK

SEQ ID NO: 23821 - protein, 57 aa, Artificial Sequence
  Synthetic
SESETVKKENEDHIRKLEDDLRKLEEDNKRHVDDIERRLRDLKRENERFAEEVKKRG

SEQ ID NO: 23822 - protein, 59 aa, Artificial Sequence
  Synthetic
EEVKKTLETLVRTNRRAIREVERRLKESLDHNREVLKRAEEDLRRSIRHLREVVREADR

SEQ ID NO: 23823 - protein, 60 aa, Artificial Sequence
  Synthetic
SIEDELRELKERLERVVEELRRLHEKTIEDLKRVVEKSEKTLRDIRRELERVVEEVRRRR

SEQ ID NO: 23824 - protein, 59 aa, Artificial Sequence
  Synthetic
KEVLDRLRKKVEDTIRKMKDEAKKLDDEHKKAVRRLEERNEETARRVRKAVEDIERETK

SEQ ID NO: 23825 - protein, 60 aa, Artificial Sequence
  Synthetic
SIEDILRKLTKDLEDVIRRSRKTSEDLKEELKRVLDKHKEKLDRILEDVERVVREVEERR

SEQ ID NO: 23826 - protein, 59 aa, Artificial Sequence
  Synthetic
KEILDRLEEEVRRLIEELDKENDEARKEHREVAKRNEEEIKKLEEEAKDSIRRLREESR

SEQ ID NO: 23827 - protein, 57 aa, Artificial Sequence
  Synthetic
RESEELDKRLKEIAKDIRDKLDEIRRENEKTAKEIEDTIREIERDNERIDREMERRG

SEQ ID NO: 23828 - protein, 59 aa, Artificial Sequence
  Synthetic
KRFKDVIRRLEEELKKLLKRAEEEIRDSKRHLRELLKKVEKVIRESKANLDRTLKKLRD

SEQ ID NO: 23829 - protein, 60 aa, Artificial Sequence
  Synthetic
SEEEDLRRKVEELEERVERYKEELKKEIERIETENKRHVEELERRLRKIAREVDDAKRRQ

SEQ ID NO: 23830 - protein, 59 aa, Artificial Sequence
  Synthetic
EDLDRLLDEMRREAERLLDELRKVTERIAREVKRSNEENKKVLDEIRKAIKDLLDKLRK

SEQ ID NO: 23831 - protein, 59 aa, Artificial Sequence
  Synthetic
STEEKVEEDLRRLEEKNRRHVREIEERLERMKEENRDHVRKLEEKLRRLDEEVRKVKEG

SEQ ID NO: 23832 - protein, 56 aa, Artificial Sequence
  Synthetic
RETLKRAERKLRESLRHNREVLERARRELKKSLDHNDKALEDAERRIREIREELEK

SEQ ID NO: 23833 - protein, 59 aa, Artificial Sequence
  Synthetic
DLKEVLDKLRELVREVTERIKRTIEEIERLLRKVEREMRETIRTDEELLKTVVDELRRK

SEQ ID NO: 23834 - protein, 59 aa, Artificial Sequence
  Synthetic
RRKIKKVLDDLRKIIEDIERESRESLERLREIIERLKRRSDKTLKDSKKVIDDIRRRTK

SEQ ID NO: 23835 - protein, 59 aa, Artificial Sequence
  Synthetic
DLEEVLEDLRRLMEEVKRRIERTIEEDKRLLDEVERRIRETIRRDRELLKEAERDLREK

SEQ ID NO: 23836 - protein, 59 aa, Artificial Sequence
  Synthetic
RDKIRKVRKELREIIDRIRRESERSLEESRRVIEKIDEKSKRTLEESRRVIEEIKEKAR

SEQ ID NO: 23837 - protein, 56 aa, Artificial Sequence
  Synthetic
SSEEMLRTVEELIKEARKRLDESLEEVRKRIEDAKRRHEESNDENRRLVEDAKRRV

SEQ ID NO: 23838 - protein, 55 aa, Artificial Sequence
  Synthetic
KDVLEELREIIDRLRRESEDSLRRLEKIIKDSEDRSRESSEELKEIIKRLLEEDK

SEQ ID NO: 23839 - protein, 56 aa, Artificial Sequence
  Synthetic
SKDEVLEEVERRIRTAERDLERMVRRNEELIRDAKREHERSNRENERLVTEAKREI

SEQ ID NO: 23840 - protein, 55 aa, Artificial Sequence
  Synthetic
KDVLDELRDIIRRLREELKKSSDDLERIIRRSVKESRDSSEELRKIIEDLKREAT

SEQ ID NO: 23841 - protein, 56 aa, Artificial Sequence
  Synthetic
SEKEVLDEVKELIERAKERLRRMLERNERLVRDAERKLKRLLDEDRESIERVKKRL

SEQ ID NO: 23842 - protein, 55 aa, Artificial Sequence
  Synthetic
ERVLEELKKEIRRLEEEVKKSSEELERIIEKLLEELKRSLEESEDIIRRLEEETR

SEQ ID NO: 23843 - protein, 56 aa, Artificial Sequence
  Synthetic
RKDELLRRVEEEIKKVKKRLKEMLDTDRKLIEDAERKLEEAERRDSDLIRRAKERV

SEQ ID NO: 23844 - protein, 55 aa, Artificial Sequence
  Synthetic
DRVLEELERIIEELKREIEKSLRETEKIIKELEDELRKSLEETERIIRKLEEESK

SEQ ID NO: 23845 - protein, 56 aa, Artificial Sequence
  Synthetic
RSEEVLREVEKAIRRAKEELKRAVETDRRRNTEAARALEEILDTDRRLIEEAKRRL

SEQ ID NO: 23846 - protein, 55 aa, Artificial Sequence
  Synthetic
EKVLRDLKKIIDDLRRRIEESLRDSERIIEKLRRDLEASLEESRRIIERLKEKAD

SEQ ID NO: 23847 - protein, 56 aa, Artificial Sequence
  Synthetic
REKELLDKVKELVERAKRELERLVREDDKLNEDLKRRLTKILKEDSDRIKEVKERL

SEQ ID NO: 23848 - protein, 55 aa, Artificial Sequence
  Synthetic
DKVLEDLRKIIEDLLREIEESLRESREIIKKLEKRAKDSLKETEEIIEELERRDT

SEQ ID NO: 23849 - protein, 60 aa, Artificial Sequence
  Synthetic
SEVEELLDRVKKVADESRREAKRLLDESKRVIDKSLDEVRRLLKESREVIEEVKKRVDEK

SEQ ID NO: 23850 - protein, 56 aa, Artificial Sequence
  Synthetic
DEVLKRLEDLLRKVAEEHRRITREDEELLKRAEEEHERFSKEDEDLLRKAEKEVED

SEQ ID NO: 23851 - protein, 60 aa, Artificial Sequence
  Synthetic
SRVDELVKRVRDVAREVKRINDELLKRVEEVIKESRDRVRELLKKVEDVIRRAAEEIDRI

SEQ ID NO: 23852 - protein, 56 aa, Artificial Sequence
  Synthetic
KEVVREIEKLLEDVRRTSEDTVRKIRELVAEVDDDHRRASETIRRLLKEAEDRARK

SEQ ID NO: 23853 - protein, 60 aa, Artificial Sequence
  Synthetic
SEVEELLKDVERVIKRSEDEVRRLEREVEKSSEDVERINRKLLRDSREVIKKVIEDVRRV

SEQ ID NO: 23854 - protein, 56 aa, Artificial Sequence
  Synthetic
KEVLDRIRELLETARRRHKEATKKIKRILEESEKKSRRSIEEDKRLLDEAKEEVRR

SEQ ID NO: 23855 - protein, 57 aa, Artificial Sequence
  Synthetic
SVEEVVRDNERRLEEDAERTRRVARRIEKLLDELRKKVEDVIREAKERLERLLEEIG

SEQ ID NO: 23856 - protein, 60 aa, Artificial Sequence
  Synthetic
AEDLLREVNKRNEEVIRRNKELLDEVEKRIREVIKRLEELLEKVKRELERVADELRKAKK

SEQ ID NO: 23857 - protein, 57 aa, Artificial Sequence
  Synthetic
DVERVLKENKETLDEDRKRTKEVIDRNKKKLEDLAREVRKVIEEIKKRLKELLDKTG

SEQ ID NO: 23858 - protein, 62 aa, Artificial Sequence
  Synthetic
EEAEELLRRVNKDNEKVVRENEKLLKEVLDDSERVIKELRDLLEEVRRRIEKVIRDLEERRR

SEQ ID NO: 23859 - protein, 59 aa, Artificial Sequence
  Synthetic
STDEFIERLKKILRENEEKVKEVLKRNEDLLKEDEDRTRKAIKELEDKLRRVKERVERQ

SEQ ID NO: 23860 - protein, 56 aa, Artificial Sequence
  Synthetic
VKEIEKELRRVSEESERELRKHDENTKRVSEENKERIDRLRKTLDEVIERAEERAK

SEQ ID NO: 23861 - protein, 60 aa, Artificial Sequence
  Synthetic
SLDEVIRRLEETLRKDEEDTRDVIRKVRRILEENRKEVKRVIDELRRRLEEVKKRVEDSK

SEQ ID NO: 23862 - protein, 56 aa, Artificial Sequence
  Synthetic
ADTIREELRKVLEDNKRILRRLLEELKRVSEESRDRLRRLKEELERVIEEVERRAK

SEQ ID NO: 23863 - protein, 60 aa, Artificial Sequence
  Synthetic
SIARKVLTDLRKIVEDLERDVERSDRDSERVVREVLERNEEVLKRLRDIVEEIKKVIREV

SEQ ID NO: 23864 - protein, 59 aa, Artificial Sequence
  Synthetic
RDDVERIKRDLERILKEVARKATESVKRNERILEEVKRHAEKSTEDVERLLRELEDTVR

SEQ ID NO: 23865 - protein, 60 aa, Artificial Sequence
  Synthetic
DEIEDALREARRVTEEVRREIEKSDKESEDVVREVLRRNEEVLRRLREIVKEILDELRKR

SEQ ID NO: 23866 - protein, 59 aa, Artificial Sequence
  Synthetic
EKRVREVLRDLERLHEESKRTVERSVERNKTILKEVRKHAETSKRELERILEDVKRATK

SEQ ID NO: 23867 - protein, 60 aa, Artificial Sequence
  Synthetic
SEIDKVKKDLEKITRDVERAIKKSDDDSRKNSKEVLETNERVLEELRRIVKEVLDEIRRV

SEQ ID NO: 23868 - protein, 59 aa, Artificial Sequence
  Synthetic
RDRARDVDKKIKDLHKKSEDEVRKSVKRNRDLLEESKRHAEESREDIRRLLDEVREEAK

SEQ ID NO: 23869 - protein, 60 aa, Artificial Sequence
  Synthetic
SSAETVLTELRKIVRDILEKSKKSNDDLRKIVEEILKDNEDVLRELREILRRIKEKIDER

SEQ ID NO: 23870 - protein, 59 aa, Artificial Sequence
  Synthetic
KEKVDRIRDDIRRLLKKLRDDVERSVRDVRRILKEVKEHAERSEEEVKRLLKELRDRAK

SEQ ID NO: 23871 - protein, 60 aa, Artificial Sequence
  Synthetic
DEMDKVLKDAEDVTRRVKEELRKVDEESRRVVKRILDENRRVLKELEDRVRDLRRLIREI

SEQ ID NO: 23872 - protein, 59 aa, Artificial Sequence
  Synthetic
EEDVRKIKEDLERLHRESKRDVERSARDNERILEEVKRHADESRREVKRLLDEAKEEVD

SEQ ID NO: 23873 - protein, 60 aa, Artificial Sequence
  Synthetic
DDLERVLRELERLVDEIRKEIEKVDRESEELDRRVKETIKELDERSKRLVEEVEDMIRRN

SEQ ID NO: 23874 - protein, 55 aa, Artificial Sequence
  Synthetic
EEVVRRVEKIVRELRKTVEDSIRRNEKSVEETRREAEKSEKRNRELVKRLEEKAK

SEQ ID NO: 23875 - protein, 60 aa, Artificial Sequence
  Synthetic
SEAEKVLKELEDLVRRIEEDIRRTNEEVRKLDEDVLEDIKRVDEESKKLVREIEERIRSR

SEQ ID NO: 23876 - protein, 54 aa, Artificial Sequence
  Synthetic
EFVRRLEELVKRLADKVKESVDTSRTSVKRTEDEARKSVRRNEDLVRRLEEDAK

SEQ ID NO: 23877 - protein, 60 aa, Artificial Sequence
  Synthetic
SELEKVLEELERLVKRIEEEIKRTNKEVRDLDEEIRKAIERSNRETERLAREVLERIREE

SEQ ID NO: 23878 - protein, 55 aa, Artificial Sequence
  Synthetic
EEVVRRLEDLVRRLEESVERSVRTSRKSVKETEDRIREVERHDERLVEELERAAK

SEQ ID NO: 23879 - protein, 60 aa, Artificial Sequence
  Synthetic
SDLEDVLRKVEDLDRKIAEDIRRTNEDVKRLDEEIEEKIRRSNEKLRELVRRVLKAIRDR

SEQ ID NO: 23880 - protein, 55 aa, Artificial Sequence
  Synthetic
EEVVRRLEESVRRTKERIDRSLKTSRDSVRETERKIKESKDTSEKLVKDLRDAAK

SEQ ID NO: 23881 - protein, 61 aa, Artificial Sequence
  Synthetic
SEVDDILRRLREIDEKLLRENEESLKRLKDEVDRLKRKNEKSLDDLRKLVEKLIDDLRKRK

SEQ ID NO: 23882 - protein, 55 aa, Artificial Sequence
  Synthetic
EKVLEEVKRSVDRTRDHLRKSEEDVRRLLDELRRHLEDSERRVRELLRKLREKVR

SEQ ID NO: 23883 - protein, 61 aa, Artificial Sequence
  Synthetic
SKVDEILRELKRLVDELLRRIEKTLKELEDLVRELLKENTRSLEELRELVERLLEELRRRK

SEQ ID NO: 23884 - protein, 55 aa, Artificial Sequence
  Synthetic
REFVERVRELLKRLEDELRKSNRTIEKLLRDLARHLEDSIRRVEELLRELEEKAT

SEQ ID NO: 23885 - protein, 60 aa, Artificial Sequence
  Synthetic
KEVEDILRELEKIAKDLRDEIRESDDESRRLVEELLKRSEDTLKELRDLVKKLLDRLRER

SEQ ID NO: 23886 - protein, 55 aa, Artificial Sequence
  Synthetic
EEVVKRVEELIRRVEEEVRRSTRRNEKLLEDLRRELERSDRELEKLMDDLRRKLK

SEQ ID NO: 23887 - protein, 60 aa, Artificial Sequence
  Synthetic
DDVEKILEDLKRIDTELTKRTRDSNKELEDEVRRLMERSRRTLKELEDEVRKLLDRLRKR

SEQ ID NO: 23888 - protein, 55 aa, Artificial Sequence
  Synthetic
RKVLEDVRRSLERTERELRESDKSVKKLLDELKEELDRSDREVERLLEELRDAVR

SEQ ID NO: 23889 - protein, 60 aa, Artificial Sequence
  Synthetic
SEVDEILRKLRELVKELIRRTEESNEKLRKLVEDLRDESRKSLEELRELVERLADELRKR

SEQ ID NO: 23890 - protein, 55 aa, Artificial Sequence
  Synthetic
ERVVREVEELLKELKRRLEESDKSVAELLRRLEKDLRESDRRVEELLKRLEDEVK

SEQ ID NO: 23891 - protein, 60 aa, Artificial Sequence
  Synthetic
SEAEKILTELEEIDRRLVKRTEDSNRKLRDTVRKLEEESKKSLEELRELVDRLLKRLDER

SEQ ID NO: 23892 - protein, 55 aa, Artificial Sequence
  Synthetic
REILERVRESLERTDKRLRESDESVKKLLEDLKRKLEESDRRAERLLEELRKRAT

SEQ ID NO: 23893 - protein, 58 aa, Artificial Sequence
  Synthetic
SELEEVLKRVEETVRRLTKRLEESLEETRRIVDKLREDLRRSLERTERIVRELTEKLG

SEQ ID NO: 23894 - protein, 59 aa, Artificial Sequence
  Synthetic
EEELREVEKKAEKLVRELEERLKRVIEDSERLVTDLKEKLERVLETSKKLLADLEERAR

SEQ ID NO: 23895 - protein, 57 aa, Artificial Sequence
  Synthetic
KELDEVLEKVKRIVDELERKLERSLRETKRIVDELREELKKSLKETEDIVRELERDL

SEQ ID NO: 23896 - protein, 59 aa, Artificial Sequence
  Synthetic
DERLTEVEERAKRLVDTLAEKLKEVERRSEELVKTLEEELRRVLDTSRRLVEELREKAR

SEQ ID NO: 23897 - protein, 58 aa, Artificial Sequence
  Synthetic
SELEEVLKEVEEIVRRLEEELRKSLKETREIVTKLLKKLKESLEDSERIVRELSRKLG

SEQ ID NO: 23898 - protein, 59 aa, Artificial Sequence
  Synthetic
DEEARKVLETAKKLVDDLKRKLERVKEESAKLVDELRKELRRVNERSKELVEKLEREAK

SEQ ID NO: 23899 - protein, 57 aa, Artificial Sequence
  Synthetic
SELEKVLREVEEEVRRLKKKLKESLDRTKEIVDRLKKDLKRSLDETKKIVDELREKL

SEQ ID NO: 23900 - protein, 59 aa, Artificial Sequence
  Synthetic
DKDLKDVERKAEKLVEDLDRELKEVEKTSRKLVKELEAELREVDKTSKKLVDDLRKDAK

SEQ ID NO: 23901 - protein, 61 aa, Artificial Sequence
  Synthetic
REVEELLKEVEESTRTSKKIIEDLLRRVKESSDKSKKDIRRLLEEVRRIVDTVRKILERRG

SEQ ID NO: 23902 - protein, 62 aa, Artificial Sequence
  Synthetic
EELEKRVREVEETLKRLVDENRETLERVARKAKRLVEDDKRDLEEVVRELEELLKRLKEELD

SEQ ID NO: 23903 - protein, 61 aa, Artificial Sequence
  Synthetic
SSVDRLLERVKRTTDESKERVERLLERVKESSERSEREIKRLLEEVERIVREVKKEVERRG

SEQ ID NO: 23904 - protein, 62 aa, Artificial Sequence
  Synthetic
EEVEKRVREVERTVEELVKEDREAVKRVEETIRRLLKKNEDTVKKVEDDLRKLLEDLKRDVK

SEQ ID NO: 23905 - protein, 60 aa, Artificial Sequence
  Synthetic
SEIEELLRRVKKVNDESRERIKELDKRSREVNERSRRKNEELLKRVEEVVREVEERIDRT

SEQ ID NO: 23906 - protein, 62 aa, Artificial Sequence
  Synthetic
KELEDRVRDAVRRLERSLKENEDRVRESIERNKDSVRRNEEHVDESIKRLEKEVDRVRKRAE

SEQ ID NO: 23907 - protein, 60 aa, Artificial Sequence
  Synthetic
SEIEKLLEDVRKVAEEVKRAIDRLNEENKRVNEKSKERIDRLLEEVRKVVEEVLRRVKTS

SEQ ID NO: 23908 - protein, 62 aa, Artificial Sequence
  Synthetic
EEVEKRVRRVVEKLREIVKEVEEKVRRALDENRRSLEENRRRVKRVIEELEKILKEVEDEVR

SEQ ID NO: 23909 - protein, 57 aa, Artificial Sequence
  Synthetic
DEVEEMEKELKKLLDDSKRRSDELIEEMRKLNEESKKRSRELEKRLRDINKEIRDRL

SEQ ID NO: 23910 - protein, 59 aa, Artificial Sequence
  Synthetic
SKLLDDLRKTIEKVIRESRELLEELRKENERVIEESEKLLRDLLRENEKVAEEVRRTAT

SEQ ID NO: 23911 - protein, 57 aa, Artificial Sequence
  Synthetic
SEVEELIRRLEKLLREVEKRARRLIEEAKRLNDESNKESRRLIEELERLVEDVAREA

SEQ ID NO: 23912 - protein, 59 aa, Artificial Sequence
  Synthetic
EKLLRDLERAIRDVVRKLEELLRRLREENERVIKESEELLERVRKEIEDVLREAREAAR

SEQ ID NO: 23913 - protein, 57 aa, Artificial Sequence
  Synthetic
SKVEKLITELEKLLKDSNKKTEDVERELERLNKKSNDDSRRIIEEHKKIVEEIARRV

SEQ ID NO: 23914 - protein, 59 aa, Artificial Sequence
  Synthetic
EELLKRLKDRIKKVVEESEKLLRDLVKENREVIKESEEILRRLAENLKRVKEEVDRRTT

SEQ ID NO: 23915 - protein, 57 aa, Artificial Sequence
  Synthetic
EEVERLIKELDDLLRRSNARTRDLIRKADEELRRSNEESRRIVERMEEINKRIADEV

SEQ ID NO: 23916 - protein, 59 aa, Artificial Sequence
  Synthetic
KKLLDDLKRKIETVIKESEDILRKLEEDLKRVIEESKELLDRLLEENKRVMEEARRRTK

SEQ ID NO: 23917 - protein, 57 aa, Artificial Sequence
  Synthetic
DEVEEIKKEAKRIVEDLKRRNEELKRRLERLVEEVKKRNEESKKRLEDIVRKIKEDI

SEQ ID NO: 23918 - protein, 56 aa, Artificial Sequence
  Synthetic
LKEVRKTLEKARKENEDVIRKIEEDAKEVLRRDEESNRDINRKVDEVRKRVEERRK

SEQ ID NO: 23919 - protein, 57 aa, Artificial Sequence
  Synthetic
REVEEVKKDLERIVEEVKKRNEELKRRLEELLKENKRRNEKSDEDLKRIVDRIDERV

SEQ ID NO: 23920 - protein, 56 aa, Artificial Sequence
  Synthetic
LKDVKRVVEKVRRENEKVLREILTDAEKVSRDDETSNRDLNRKLEEARERVERKAK

SEQ ID NO: 23921 - protein, 57 aa, Artificial Sequence
  Synthetic
SEVEEIKERLKRLVEEVERRNRKVIRESEETVKENEKENRKSKKRLKEILDEIVERI

SEQ ID NO: 23922 - protein, 56 aa, Artificial Sequence
  Synthetic
LKDVKRDVERVLKENKEVLDRLRKEDEEVSRRDKKSNEDINRVVEDVKRKLEEKAK

SEQ ID NO: 23923 - protein, 57 aa, Artificial Sequence
  Synthetic
SEVEKVKEDLKKLVKEVEDRNRESKRRSEETVKENTKKNEDSKRRLKEIVDRIREEV

SEQ ID NO: 23924 - protein, 56 aa, Artificial Sequence
  Synthetic
LKDVRREVKRVLDEDKDTNDKLNDRDRKASEEDERSNRELNKTIARAEEEVKEARR

SEQ ID NO: 23925 - protein, 57 aa, Artificial Sequence
  Synthetic
KEVEDVKEKLKELVERNRDENRKTKEELRRLVEKNRKENEESKKRLKEIVEEIRERV

SEQ ID NO: 23926 - protein, 56 aa, Artificial Sequence
  Synthetic
LREVEKTAEKVSKEDKETNDRIRKDLKKVSDEDKRSNEEVNKRVDKVRKEIEEERK

SEQ ID NO: 23927 - protein, 57 aa, Artificial Sequence
  Synthetic
EESERLDELIKEVVERVKKLNEEARELIKDVLRRNEEVNTRLEELNRKVEKEVREEK

SEQ ID NO: 23928 - protein, 55 aa, Artificial Sequence
  Synthetic
RKVLEKIRRALEKVHEDNRRSIRDVERMLEKVEDDNRKTIERSRRLVKRVEEELR

SEQ ID NO: 23929 - protein, 60 aa, Artificial Sequence
  Synthetic
RSLEELKKEVERVARAVRKVSEDNKRLLDRVREEVKRVSKENRDLVREVERRVEEVKRRV

SEQ ID NO: 23930 - protein, 58 aa, Artificial Sequence
  Synthetic
ERVDRLKEEIEEILRDLERKVRENKERSKKIAEDLRKHAEDNAREVKKALRDLEEKVR

SEQ ID NO: 23931 - protein, 60 aa, Artificial Sequence
  Synthetic
SELERVLREIREVSRETRERSERSLEEIRRVVEDVRRKNKESLDRNREVLEEIRKALEKG

SEQ ID NO: 23932 - protein, 59 aa, Artificial Sequence
  Synthetic
EDRVERVKRELERLVEENERIVRESRKTLEKLVRDVDRTSKRVKDENRKLLRRVEEEAR

SEQ ID NO: 23933 - protein, 60 aa, Artificial Sequence
  Synthetic
SEVEDLLRRIRKVVEEVERRSRDSLRRNEEVVKEVEERSEKSLRDDKKVIDDVKRRLREG

SEQ ID NO: 23934 - protein, 59 aa, Artificial Sequence
  Synthetic
KDEVRKAEEELRKLVRKAEEVVKKSKEDLERTTRKVEKVVRKSEEDSRRLLREVAEEAR

SEQ ID NO: 23935 - protein, 60 aa, Artificial Sequence
  Synthetic
SKLDKILEELRRIVEEVKRRSEESLEEIERVVEEVKRRSRRSNEELKRIVDKIKKDLRDG

SEQ ID NO: 23936 - protein, 59 aa, Artificial Sequence
  Synthetic
EDDVDRVRREADKIVEDVRRVVERSKRRLDELRRDAEKVVRDSERRIDRIVDDVRRTAK

SEQ ID NO: 23937 - protein, 60 aa, Artificial Sequence
  Synthetic
SDLEEVLKKLEDILRKIKETNDKALREIEEVLRRVKERSRRSNKEAEKVLREVEKMLEKG

SEQ ID NO: 23938 - protein, 59 aa, Artificial Sequence
  Synthetic
EDEVRRIKERLERLLRTAERVSREIKKRLEELVDDVRREVKRSKDRLKRLVDEVAERVR

SEQ ID NO: 23939 - protein, 60 aa, Artificial Sequence
  Synthetic
SKVDEILKDIERVVREVEKKSRKSNEELKRISEESKRRNEDALRRLKEIADRVRERLDKG

SEQ ID NO: 23940 - protein, 59 aa, Artificial Sequence
  Synthetic
EDKVRDARRRLKELVDRVKRVVEESEKRIRKLVKENRDVSRRIEEELKRIVREIEEEAK

SEQ ID NO: 23941 - protein, 60 aa, Artificial Sequence
  Synthetic
SKLEEILKKVEKVSEDTKRKSEDSNRRIKKVSDESKELNKKALRDITEMAKEVDRVLKEG

SEQ ID NO: 23942 - protein, 59 aa, Artificial Sequence
  Synthetic
EDRVDEARRRLERLVEDNARVVKRSEDELRKLVEDNRRVSEEIERKLKELLKRVAESVT

SEQ ID NO: 23943 - protein, 60 aa, Artificial Sequence
  Synthetic
SKAEEALKELERVADEARRASEKSNREAKKAADDAKRASEKSLREAERAAREAEKALREG

SEQ ID NO: 23944 - protein, 59 aa, Artificial Sequence
  Synthetic
KDDAKRIKDEADKIVKRAEDAARESKKRLKRLVEDAERAAKESKEELDRLVREAEEKAR

SEQ ID NO: 23945 - protein, 60 aa, Artificial Sequence
  Synthetic
SEVERVLKELEDLIRKLEEEIERSLRELEKLIEELKKEIKESLDELEKLIRDLIRRLDER

SEQ ID NO: 23946 - protein, 56 aa, Artificial Sequence
  Synthetic
SEEADKRAKELLDKLRKVIEKSKEDSRKILKDLERTVKRSEEESRKVLEKLERRVQ

SEQ ID NO: 23947 - protein, 60 aa, Artificial Sequence
  Synthetic
DEVERVLRELRELIKRLEEEIRKSLKELEDLIRRLIEEIEETLKKVEKIIRELKARLEER

SEQ ID NO: 23948 - protein, 54 aa, Artificial Sequence
  Synthetic
ELREEAKKLLRRLEKTVEKSKRDSEKVLRDLEEVVRESERASKELLKDLKRKVD

SEQ ID NO: 23949 - protein, 61 aa, Artificial Sequence
  Synthetic
SELERLLREVEKSSRESVETSRKLNEEVEKTTRESKRRIEELLRRVEKIVDEVKKVIDRDG

SEQ ID NO: 23950 - protein, 62 aa, Artificial Sequence
  Synthetic
DEARERLRRVAEEIKRLAKENKRVAEESKRRAKELLDDNKDTVRRVSERLKELLEDLDRKLK

SEQ ID NO: 23951 - protein, 61 aa, Artificial Sequence
  Synthetic
DEIEDLLRRVRKTTEESKKRSEDLNKEVKDSTREVKKRIKELLEEVERRVKEVKERMERDG

SEQ ID NO: 23952 - protein, 62 aa, Artificial Sequence
  Synthetic
EEAEKRVRRAKEEAERLIRDNERKLKESEEELRRLIKETEDVLRKAEEDIRRILADLRRRLK

SEQ ID NO: 23953 - protein, 61 aa, Artificial Sequence
  Synthetic
SEVEKLLEDVRESTKRVKELSKRLNEEVERTTKESEDRTRRLLEEVKRIVEDVKDKLRKRG

SEQ ID NO: 23954 - protein, 62 aa, Artificial Sequence
  Synthetic
EEAKKRVKEISDEIRKLAEETREVLERSEKRLRELIRRNEKVNKEVAERLEEILRDLDRKLR

SEQ ID NO: 23955 - protein, 56 aa, Artificial Sequence
  Synthetic
REKEDAKRRLEEILREVKKDLDRVHRENEKLVEDTARTVERIKRELKKLLDRAREV

SEQ ID NO: 23956 - protein, 56 aa, Artificial Sequence
  Synthetic
IEELRKRVEDVVRRVKEELERLLKENEDSTREVKKEAERLLDEIRKVLEKVERDAK

SEQ ID NO: 23957 - protein, 56 aa, Artificial Sequence
  Synthetic
REKEEAEDRMRRILEEVRRTLEEVHKENRRLLEDTRRTVERIERENRKIVEEVRRV

SEQ ID NO: 23958 - protein, 56 aa, Artificial Sequence
  Synthetic
IETLERRVREVVERVKKELERLLRENKKSTEEVKRTAEDLLRKNREVVEEVKKAAK

SEQ ID NO: 23959 - protein, 61 aa, Artificial Sequence
  Synthetic
DEVEELERRLEELLKKSRDEVTKLADELDRVLERSREVVKKDRESLKEILKEVERLVREKN

SEQ ID NO: 23960 - protein, 59 aa, Artificial Sequence
  Synthetic
KELLDRLEKELRESVKRSEERLKELADRIRKSLEDSERLSRRTNERIKRVLEEVTERVK

SEQ ID NO: 23961 - protein, 61 aa, Artificial Sequence
  Synthetic
DEVEDVSRKLDEALERSRRITEDLEKKLREVIETSKREVDKLAERLDEVIREIEERIRKKN

SEQ ID NO: 23962 - protein, 59 aa, Artificial Sequence
  Synthetic
KELIEKLEEDIRRVLEKIKREHERLLRKIEESLKDSKRRLDKLRRDIERILERIREALR

SEQ ID NO: 23963 - protein, 60 aa, Artificial Sequence
  Synthetic
REIEEALRELEEVLRKVKEDNKRLEEEIRRVLEEVKRINEKLLRDAKKELDRVKEILKDT

SEQ ID NO: 23964 - protein, 55 aa, Artificial Sequence
  Synthetic
EEAKKELRRLVKEVEDVVRTSTRRLEELVKEVRRVSEETKRALDELVKEVREEVR

SEQ ID NO: 23965 - protein, 60 aa, Artificial Sequence
  Synthetic
DEIEDVERKIKEVVDRVRDINRRLRDTIRRVLEKVTRINEELRDTVRKVLKEVERILREI

SEQ ID NO: 23966 - protein, 55 aa, Artificial Sequence
  Synthetic
EEIKEKLERLVREVKRISEESAKDLERLVREVEKVVEDSERELRRLVEEVERRRK

SEQ ID NO: 23967 - protein, 60 aa, Artificial Sequence
  Synthetic
SEIEKVRKEIDEVLKRVRKINEDLLRELEEVSKRSKDINDDDLRTNTEVLKEARRILKDS

SEQ ID NO: 23968 - protein, 55 aa, Artificial Sequence
  Synthetic
KDVTKELDELVREVEEEVRRSKDTLRRIVEENREVVERSERKLKKSSDDVREERR

SEQ ID NO: 23969 - protein, 60 aa, Artificial Sequence
  Synthetic
SELEKVLRELEENSRRNEEELRRSNDKVRRVLDEIRRKLEEVLRKVEEVLRRIEEELSDK

SEQ ID NO: 23970 - protein, 60 aa, Artificial Sequence
  Synthetic
VKDKVKKAEDDVRRLLERNRRLVEESKKSSEEFLRRVEKLVDDARKKVEDALRKVRETAR

SEQ ID NO: 23971 - protein, 60 aa, Artificial Sequence
  Synthetic
SELEKVLRDLEKNSRENEELLRRSNKKLKDVVDKIKKKLERALEELREVLEKIRRELSRS

SEQ ID NO: 23972 - protein, 60 aa, Artificial Sequence
  Synthetic
MDDKVRKAEEDVKRILDENRDLVRRSEENSKRLLERVRELVERVKDAADKLLREVREEAR

SEQ ID NO: 23973 - protein, 60 aa, Artificial Sequence
  Synthetic
SELETVLRELEENSRRNEELLRRSLDRVRRVLEDVTKKLREVLEEVRTVLEDVKRKLSRV

SEQ ID NO: 23974 - protein, 60 aa, Artificial Sequence
  Synthetic
VRDKVKEAKDRVRKILEDNRRLVEKSEEDSKRILETLRKLVEEMKRELERIETELREAAR

SEQ ID NO: 23975 - protein, 60 aa, Artificial Sequence
  Synthetic
SELETVLRKLEENSRRNKKLLRDVLEEDKTVLRDVERKLREVLDELRKVLEDIRDKLSRK

SEQ ID NO: 23976 - protein, 60 aa, Artificial Sequence
  Synthetic
VKDKAETMKKAVEEILDRNRKLVTEAEKRSEDSLRKLRKSVKEVEEKVKRVLEEVKKEAD

SEQ ID NO: 23977 - protein, 60 aa, Artificial Sequence
  Synthetic
DELERLLEELERNSRENKKRLDESRKRVKEVLDRIEKKLRDVLREVEDVLRKIREKLERK

SEQ ID NO: 23978 - protein, 60 aa, Artificial Sequence
  Synthetic
VKDKVKELRDRVKELLDRNREEVRKSEEDSKRVLDEVKRLVDELRERLREIRKRVEEEAK

SEQ ID NO: 23979 - protein, 60 aa, Artificial Sequence
  Synthetic
SELEDVRRELEENSRRNEETLRRSLAELEENSERNRRELERVLAEVEKVLKKATETLSRV

SEQ ID NO: 23980 - protein, 60 aa, Artificial Sequence
  Synthetic
VRKEVKKVEDDVRRILEENRRLVEESERRSRRILEENEELVEDIKRKLREIEKELRERVR

SEQ ID NO: 23981 - protein, 60 aa, Artificial Sequence
  Synthetic
SEVEELEREIRELVERNRELVRRLEEEARRLSRRNEELVRELKERAERLVKELKERLDRV

SEQ ID NO: 23982 - protein, 59 aa, Artificial Sequence
  Synthetic
KDTLDEVRKEVRKLSKENEERLREVLEESRRLSKRNEEILKEIAERVKRLVDKLTDDIR

SEQ ID NO: 23983 - protein, 57 aa, Artificial Sequence
  Synthetic
SEVEDVERRVRKLLEENDRLLEENEKSARELMKRDKKVSDENEKSVRDLLDRLRKEI

SEQ ID NO: 23984 - protein, 56 aa, Artificial Sequence
  Synthetic
LEELLKKLRKLSEDNERLLRESNERAKRSTDESERLSRETNERVKDVVTRLKEASK

SEQ ID NO: 23985 - protein, 57 aa, Artificial Sequence
  Synthetic
DEVDEARKEVDKLAKENTELVKRNKDSVKELVREDEDELRKNRESVDELLRRLEEEI

SEQ ID NO: 23986 - protein, 56 aa, Artificial Sequence
  Synthetic
LEEVLKTLREVSDRNKKLLEESNERVRKSTKESKDKLRKSNEEVKRVLKELRDTDT

SEQ ID NO: 23987 - protein, 59 aa, Artificial Sequence
  Synthetic
DELDRLLEEVKRSLEDVEEKLKKLEEEVKRVNDELRKRLTRLLREVERSLKRVEDLIRN

SEQ ID NO: 23988 - protein, 56 aa, Artificial Sequence
  Synthetic
LEEVRERLKESLDRLRKRVEDLKRRLRESLESVRKLVEDLERALRKSLEELRERVR

SEQ ID NO: 23989 - protein, 59 aa, Artificial Sequence
  Synthetic
EELDRLLKRVEESLRRVERILKELLDRVRKVNEDVKRTLDDLLRRSKESLDRVRKLREE

SEQ ID NO: 23990 - protein, 56 aa, Artificial Sequence
  Synthetic
LEEVEERLKRSLRELERLVRELEEELKKSVKSVRDLLEELKRRNEDSLRRLAEEIK

SEQ ID NO: 23991 - protein, 59 aa, Artificial Sequence
  Synthetic
KELDDLLREVERSLDRVRKRLEDLLREVERVNEEVKKRLRDLLEELKRVADELRKLRED

SEQ ID NO: 23992 - protein, 56 aa, Artificial Sequence
  Synthetic
LEDLERELKRSLKELRDEVRELEERLRRSVESVRRVLKELEERARRLLKEVRDEIK

SEQ ID NO: 23993 - protein, 59 aa, Artificial Sequence
  Synthetic
SELDKLLEDVKRSLDEVKRLLKELLDRVKKVNKELEEVLKRLEEDSRRVVEEVEKATRD

SEQ ID NO: 23994 - protein, 56 aa, Artificial Sequence
  Synthetic
LEDLERKLEDSLRRLEELLRRLEDELRKSLTSVRKRVKELEEKNRELLKRVEEKIR

SEQ ID NO: 23995 - protein, 59 aa, Artificial Sequence
  Synthetic
KELDELLKRIEDVVRRLEEELKRLLDEARKVNEDLERRLRKLREDVERSLREVDKMIRN

SEQ ID NO: 23996 - protein, 56 aa, Artificial Sequence
  Synthetic
LKDLEKALEELLDRVRRLVKELRDRLRDSLRSVEEEVKKLKDELDRSRKAVRDKVK

SEQ ID NO: 23997 - protein, 59 aa, Artificial Sequence
  Synthetic
SELDRLLERVRKSSTDSEKTLKELRDEIRRVNDEVRKVLEELLKESRRVAEEVKKVIDN

SEQ ID NO: 23998 - protein, 56 aa, Artificial Sequence
  Synthetic
LEDLERELRRLLRRDRELVKKLEEDLRRSLKSVEEEARRLERANRELLREVEEKAK

SEQ ID NO: 23999 - protein, 59 aa, Artificial Sequence
  Synthetic
SELDKLLRDVEESSRRSEETLRKLEKEVRDSSTESERILRELRDRIKKVADDVEKVIRD

SEQ ID NO: 24000 - protein, 56 aa, Artificial Sequence
  Synthetic
LEELEKRLEDLLRRDKKLVDDLRKKLRDLEKRDRDLVEELRRELEELLKRVEDAAR

SEQ ID NO: 24001 - protein, 59 aa, Artificial Sequence
  Synthetic
SELDRLLREVEKSSKRSEETLRDLRREVEDSSRRSEEILRRLLEESEKVAREVRKLIED

SEQ ID NO: 24002 - protein, 56 aa, Artificial Sequence
  Synthetic
LEELEKRLRELLKRDKELVDELRKRLEELLKRDRELLKRLEEENRRLLEEVERRAR

SEQ ID NO: 24003 - protein, 59 aa, Artificial Sequence
  Synthetic
KELDELLDEVRRSSETSERILRKLLREAEESTDRSKRTLKELLRELEEVVERVKKMIRD

SEQ ID NO: 24004 - protein, 56 aa, Artificial Sequence
  Synthetic
LKDLEKALRDLLDRDRKLVEELEDRLRKLAEEDEKVLRELEEELKRLLEEVAEETR

SEQ ID NO: 24005 - protein, 60 aa, Artificial Sequence
  Synthetic
SLLEKLERDLERVHKESEDLARELRKELKRVHEESRELMKEIDKELRRVLEEVKSLLRRG

SEQ ID NO: 24006 - protein, 62 aa, Artificial Sequence
  Synthetic
EDVKDKVRRVEEKVEELLDRNRKLVEEVRREVEKVLRDDRRLVREVERKLKEALDEVRERVR

SEQ ID NO: 24007 - protein, 60 aa, Artificial Sequence
  Synthetic
SEVEEVERRVDEVLKELKRKVDRSREESERIARELERLVEESEKKVRDVVRELEDLLRKV

SEQ ID NO: 24008 - protein, 54 aa, Artificial Sequence
  Synthetic
DLKEKIKEVEDRVDKVIKENKDLLDDVERRVRKVIKENEDLIKELRKRVEEVAR

SEQ ID NO: 24009 - protein, 60 aa, Artificial Sequence
  Synthetic
SKVEELEKRVRKVMEKLKKLLKDSEKESDDVARRLEELLEESEREVREVLRELEDLLRKV

SEQ ID NO: 24010 - protein, 54 aa, Artificial Sequence
  Synthetic
DVDETIKRVEEEVKKVVDDNRRLNEEILRKVKKVIDDNRRLIEKVREDVDRMAK

SEQ ID NO: 24011 - protein, 57 aa, Artificial Sequence
  Synthetic
SVVETVDKRLKRLLEKVEKSTEDSRRTAEESKKRVDRSTERVKEVLDRLRREVERLK

SEQ ID NO: 24012 - protein, 59 aa, Artificial Sequence
  Synthetic
KEKVRTVEKRAEDVIREARKLLEESKRRHDKVVEELERLLKKSKEDVDRVIKELEERRK

SEQ ID NO: 24013 - protein, 57 aa, Artificial Sequence
  Synthetic
DEVEEVKKRLDELRKEVERSTREVREVLKKLLKEVKDSTDDVRRTIEKLLRDVERLK

SEQ ID NO: 24014 - protein, 59 aa, Artificial Sequence
  Synthetic
KEELKKVEDRVREVIKDLEELLRDSKRTVEKVERELEDLVRKSEEEAERVERELEERAR

SEQ ID NO: 24015 - protein, 56 aa, Artificial Sequence
  Synthetic
SVVEEVDRLLEELLRKVKKSTDESKETAKESRKEVKRSTEDNDRTVEKLRDEVRRL

SEQ ID NO: 24016 - protein, 59 aa, Artificial Sequence
  Synthetic
DDRVREVETRVKKVIDDVRRLVTESKKDHERVVKELRELVEESKRRNDRVVEEAKETAR

SEQ ID NO: 24017 - protein, 56 aa, Artificial Sequence
  Synthetic
SMVEEVKKVLEKLKRDVDKSTDEVRDMLRRLLEEVRESSREVERRLRELKEEVDRF

SEQ ID NO: 24018 - protein, 59 aa, Artificial Sequence
  Synthetic
KEEVKKVKKEVDEVIRRLKELVRRSEEEARRVIKTLEKLLRDSKKRVEDVIKDLDRTVR

SEQ ID NO: 24019 - protein, 57 aa, Artificial Sequence
  Synthetic
SMVEKVEEDLKKLTRDVEKSTEESRKTAEDSARDVRRSSREVEDVLRRLRKEVEELK

SEQ ID NO: 24020 - protein, 59 aa, Artificial Sequence
  Synthetic
KEEVKKVEDKVKEVIERLKKLLDESKKRHEDVIRELEKLLEESERKVRKIIRELEETLR

SEQ ID NO: 24021 - protein, 57 aa, Artificial Sequence
  Synthetic
SVVEEVKRRLEELEKRVEDSTRDSKRTLDESERELEESSRDNRRTVEELLDELRRLK

SEQ ID NO: 24022 - protein, 59 aa, Artificial Sequence
  Synthetic
KEEVEKVEREVREVIKKLRDLVRRSREEHEKVIEKLKRLLEESEDTNRKVIKKVEDDLR

SEQ ID NO: 24023 - protein, 61 aa, Artificial Sequence
  Synthetic
SVTDEVREKLRRLLEELREVVKRVEDISRKTHEETKRVVEKVKRILEKLKREIEEVIRELG

SEQ ID NO: 24024 - protein, 59 aa, Artificial Sequence
  Synthetic
KEDLERLRRDVERVIREIEKLLRDVEEKVKETIKTDEDLLRRVKEDVERVLEEIDRRLK

SEQ ID NO: 24025 - protein, 61 aa, Artificial Sequence
  Synthetic
SVAETVKERLKDLHRRTKESNERAKRISDELNKHNEKSVRDVDREVKRLLEEITEVIKRLG

SEQ ID NO: 24026 - protein, 59 aa, Artificial Sequence
  Synthetic
KEALRKLDEEVKKVADDDRRLNEESRKRAKDSIEESRKLVRDVAERVKEVARKIREDLR

SEQ ID NO: 24027 - protein, 60 aa, Artificial Sequence
  Synthetic
DEARELIERVKRVLDRVREENTRVNKELHDILRRVEKRNRDLLRELREILKDVKKKADEV

SEQ ID NO: 24028 - protein, 55 aa, Artificial Sequence
  Synthetic
RELEKELRRLIAEVARIVEESRRNLERIEEAIKRISETSEKEIREIEDRIKKDVD

SEQ ID NO: 24029 - protein, 60 aa, Artificial Sequence
  Synthetic
SEAERAREEAKKLKEEIKKSNDELRKAAEKLKRDIERSNDELRKAIEELKRRVESLLRRV

SEQ ID NO: 24030 - protein, 55 aa, Artificial Sequence
  Synthetic
DEVLKEVKRIAEELHRHNREVLERIEKIARELEKHNRDVLDDIRRIVEKLERDLN

SEQ ID NO: 24031 - protein, 60 aa, Artificial Sequence
  Synthetic
SEEERAREDLERLREEIRRSNEKLEEDSDKLRRDIEESNRRVEEEIRRLKEDVERKLKDV

SEQ ID NO: 24032 - protein, 55 aa, Artificial Sequence
  Synthetic
EEVLEEVRRLVKKLHEHNEESLRRSEEILKDLERHNRDVLREVEEIVREALERLD

SEQ ID NO: 24033 - protein, 60 aa, Artificial Sequence
  Synthetic
REAEEAKKEADRLEEEVRDSNRKLEEDSKRLEREIRESNRKLKETAERLLRDVERLLKDV

SEQ ID NO: 24034 - protein, 55 aa, Artificial Sequence
  Synthetic
KEVLEDIRRIVKELHDHNKKSMEDSRRIIEELKRHNKRVIDEVKKIVDELREKLR

SEQ ID NO: 24035 - protein, 60 aa, Artificial Sequence
  Synthetic
REAEEAEKELKRLEDDIKKLVEDLDREAKRLKKEVDDSNRELEKESRRVKKEVRELLKDV

SEQ ID NO: 24036 - protein, 55 aa, Artificial Sequence
  Synthetic
DRMLEKVKRIVDELRKLLKTVLDDVRRIVEELHRHNKESMERTRKILEDLARRLT

SEQ ID NO: 24037 - protein, 60 aa, Artificial Sequence
  Synthetic
SEAERAREVLERLREEVERSNKRVREELKRLTEDVRRSNKKLREDSEEVRKRVEDLLKDV

SEQ ID NO: 24038 - protein, 55 aa, Artificial Sequence
  Synthetic
DEMLRRVRRIIEELHRLNKEALDRVRKIIEDLHRKNEDSLKKTEDILRRLEEELR

SEQ ID NO: 24039 - protein, 56 aa, Artificial Sequence
  Synthetic
SSIEEVLERLRRLSDEVRKRTDDVLERAREISRETEERSRRINEEIERIVEELKKR

SEQ ID NO: 24040 - protein, 59 aa, Artificial Sequence
  Synthetic
KEAVDRARREVERLVKENEDILKRLEEEVRKLVKRNEDLVEENRREVEKWRKELEDRKR

SEQ ID NO: 24041 - protein, 56 aa, Artificial Sequence
  Synthetic
SEIDEVLKKLRDDSKKVEEDTRRVLEELERISEKTRKDSEEVLREIEDIVEKLKRR

SEQ ID NO: 24042 - protein, 59 aa, Artificial Sequence
  Synthetic
REEVERAEEEVRKLVEENKRIVKEAKERVDELVERNKEIVEEIRREVERLKKELEDRRR

SEQ ID NO: 24043 - protein, 57 aa, Artificial Sequence
  Synthetic
REVEEVTKELRKISKEVEDLTREVLREAREISRRTEEESRRLNKEIAEIVERLRREG

SEQ ID NO: 24044 - protein, 59 aa, Artificial Sequence
  Synthetic
KEDVRRVAEEVKRLVDKNRRIVEEAKKEVDRLVKRNEDLMRRNREEVERWKRELEEDRR

SEQ ID NO: 24045 - protein, 57 aa, Artificial Sequence
  Synthetic
SEVDEVLKTLKKLSDDARKKTKEVLDRLRDISRRVEEESRKVLEEIRRKVEEVKKRR

SEQ ID NO: 24046 - protein, 59 aa, Artificial Sequence
  Synthetic
KDKVRKVKEDVRRLVEDNKRIVKEAREEVERLKERNKDIVRRIKETVDRLKDELRKRAE

SEQ ID NO: 24047 - protein, 57 aa, Artificial Sequence
  Synthetic
SDVDRVLKELEDISKDVEDKTREVLKRLKEISDEVKKRSEDINREIARIVEDLERRR

SEQ ID NO: 24048 - protein, 59 aa, Artificial Sequence
  Synthetic
KEKVKDARRVVRELVERNKEIVRRAAEVVKKLKKENAKLVEDNTREVKKWKERLERRRR

SEQ ID NO: 24049 - protein, 57 aa, Artificial Sequence
  Synthetic
SEVEDLLRKLKEISDESRERIKRLLEELEEISRKSKEDSERSNEELHRIVKRLKEEN

SEQ ID NO: 24050 - protein, 59 aa, Artificial Sequence
  Synthetic
EEDLRRAEDDVRRLIEDNKRLLEEAKRRVDDLRRKNEEILRESEKNVRRIEKELEDRRR

SEQ ID NO: 24051 - protein, 57 aa, Artificial Sequence
  Synthetic
SEVEDLLRKAEEISDRSRREIEKLLRELERIVREVRERSKRSNDELHRIVKELKEER

SEQ ID NO: 24052 - protein, 59 aa, Artificial Sequence
  Synthetic
EKKLRDVEKRARELIRDNERLLEDAKRRVDELRRELKKILDDSRRNVERIMKELDDEKR

SEQ ID NO: 24053 - protein, 57 aa, Artificial Sequence
  Synthetic
SEVDELLKRLEEISEESRRRSEDSNREVHEIVKEVKKRSEDSNRRLHKIVEDLKREN

SEQ ID NO: 24054 - protein, 59 aa, Artificial Sequence
  Synthetic
KDELKRAEDRVRELIKENKRILDESKENAERIDRELKKILEDSKRNVEEIAKRLEEDRK

SEQ ID NO: 24055 - protein, 57 aa, Artificial Sequence
  Synthetic
KDVEKLLRELEKISEDSKRESDKSNKEVHDSSREVERRSRESNRRLHKVVEDLKRTN

SEQ ID NO: 24056 - protein, 59 aa, Artificial Sequence
  Synthetic
DEDLRRAKREVERLIRENEKILEDSRENLRRIAERSRRVLEESERNVRRLIEELEETRR

SEQ ID NO: 24057 - protein, 57 aa, Artificial Sequence
  Synthetic
REVEELLKDLRRILEEVKRRIEKLLDELRKISEESRRRSEKSNEELHDIVKKLKDEN

SEQ ID NO: 24058 - protein, 59 aa, Artificial Sequence
  Synthetic
EKTLRDAEREVKKLIDTLRKILEDARREVKKLIDKNEKILRDSEKNVRDIAEELRRTRK

SEQ ID NO: 24059 - protein, 57 aa, Artificial Sequence
  Synthetic
DEVRELLREVKEAVDEVRRRSEESNREAHRVSEESEKRSRESNKRLHEIVEDLKRRN

SEQ ID NO: 24060 - protein, 59 aa, Artificial Sequence
  Synthetic
EEKLKRAEEEIRKVIEDLRRILRESRENAKRIIRRNREILRESKKNVEDLERELEETRR

SEQ ID NO: 24061 - protein, 57 aa, Artificial Sequence
  Synthetic
SEVEELLKRLRESSRRVRELSKRSNEEVHRSSDKVRRDSEESNRELHKIVEDLKREN

SEQ ID NO: 24062 - protein, 59 aa, Artificial Sequence
  Synthetic
ERKLREARKEVKKLIEESREVLERSERNIRELIKESRRLLEESRRNVERLKKELEDTRK

SEQ ID NO: 24063 - protein, 60 aa, Artificial Sequence
  Synthetic
SEEDEARKDVKELEDRLRKINEDSERAVRRIEEELKRILEENDREVKRLLRKIEELLRRK

SEQ ID NO: 24064 - protein, 56 aa, Artificial Sequence
  Synthetic
IETVIRELRKALEEAARRSKRLIDELKKVLEEVKRANEETNKRLTEVVEEVAERIR

SEQ ID NO: 24065 - protein, 60 aa, Artificial Sequence
  Synthetic
KEKEDAEREVERLERESRRVNRESEEEIKRLLRESEKVNEDSEREVRRIREELERLLRKK

SEQ ID NO: 24066 - protein, 56 aa, Artificial Sequence
  Synthetic
IDKVLTELRRSSEEVTRLSEELIERVARSSRKVKELSRKLIEELRKVLKDVARRLE

SEQ ID NO: 24067 - protein, 60 aa, Artificial Sequence
  Synthetic
EELERLEKDLREVIKDSERSSDDVRRRLEEVIRDNERLLEELDERLKEVIRDVEDLLRKK

SEQ ID NO: 24068 - protein, 59 aa, Artificial Sequence
  Synthetic
KKLIDDLRRKIEESLKDSRRLDEEARKEIERISRKTREDIKELLDRIKEVLDEIRERIR

SEQ ID NO: 24069 - protein, 60 aa, Artificial Sequence
  Synthetic
DELEDLERKLKEIIDDSKRLLDELEKRLRESNREVERLLDELRKELEKVIRDVEELLKKK

SEQ ID NO: 24070 - protein, 59 aa, Artificial Sequence
  Synthetic
KELIDKLVRELEKSLEESRRLIEELRKEIERTSREIEKRIRDLLKEIKDVLDDIRRRIE

SEQ ID NO: 24071 - protein, 59 aa, Artificial Sequence
  Synthetic
SELEEVEKRAEELARTLEELNRDVNRRLEELLRRLEKINRTVNDELRKLLEELKDVRRR

SEQ ID NO: 24072 - protein, 59 aa, Artificial Sequence
  Synthetic
KEDLDRLDKRVRDIVRDLERINEETRKTLEEIRERLERILKRTEENLKEIKEEVRKDEK

SEQ ID NO: 24073 - protein, 60 aa, Artificial Sequence
  Synthetic
SELEKVTEDVRRLLERLRDINRRVNEALRRLAEELKRLNDEVNKLLRELVTELKKASKDG

SEQ ID NO: 24074 - protein, 59 aa, Artificial Sequence
  Synthetic
KDKLEELKREVERIEKDVREILKRTEDNLRRIVEELKEINERTEDSLRKIVRELSEDRK

SEQ ID NO: 24075 - protein, 60 aa, Artificial Sequence
  Synthetic
REKDELRKKVEELLKRLEEISKRTKDSVERVLRELDKITKESKKRAKKLVDRLKELLKRV

SEQ ID NO: 24076 - protein, 59 aa, Artificial Sequence
  Synthetic
ERAIEEVLKTIEELIKEVEDVNRRVNETIRELLERLRRANEDVIRKVEKLIKEVEDATR

SEQ ID NO: 24077 - protein, 60 aa, Artificial Sequence
  Synthetic
SEKERLRDMLRKIRETLDRISEDTKRSLDEVRRRLEEISKRTKDNARKLVRELEELLRRV

SEQ ID NO: 24078 - protein, 59 aa, Artificial Sequence
  Synthetic
EEFVKRVEDTLRELLDRVRRENERVNRDIDRLLKEVEERNKRVNDELRKLIEDVKEAAR

SEQ ID NO: 24079 - protein, 60 aa, Artificial Sequence
  Synthetic
DDVRELIERLERILKRVEDINRDVNRKLRRVLERVRKDNEDSNRKTEKVLRDVKERADEI

SEQ ID NO: 24080 - protein, 59 aa, Artificial Sequence
  Synthetic
EKLLRDVERELKRVREDLERILRESRDVVRRVKEELDKILEESRRKVEKVRKDLEDTRK

SEQ ID NO: 24081 - protein, 60 aa, Artificial Sequence
  Synthetic
SEVEKLITDLRRILKEVEERNRELNKRNDETLKRVEETNRRVNKELKEILDRVIDEARRK

SEQ ID NO: 24082 - protein, 59 aa, Artificial Sequence
  Synthetic
EDLLRRVEEELRKVEKDLKRILDKSRDDLRKSRERLERILRRSEEIVREVEERLRRAAT

SEQ ID NO: 24083 - protein, 60 aa, Artificial Sequence
  Synthetic
DEVRKIIKELEEILEEVRKRNEKLIRENEETLERVRKINEKAIRELEDILRRVKEAVERK

SEQ ID NO: 24084 - protein, 59 aa, Artificial Sequence
  Synthetic
EDVLRDAERRVREVREKLERINKTSRDRLKRSKEEADRINKESREVVKRVKEELEKTAT

SEQ ID NO: 24085 - protein, 60 aa, Artificial Sequence
  Synthetic
DEVERVIRELERILREVEKRNRDVLRKNEETLREVRERNERAIEELRRILKKVKEEAERK

SEQ ID NO: 24086 - protein, 59 aa, Artificial Sequence
  Synthetic
EDVLRTVRKKVEEVREALDRINETVKKALDDSRRRLEKINRDVRRDVEKVREDLERTAT

SEQ ID NO: 24087 - protein, 60 aa, Artificial Sequence
  Synthetic
DEVKKLIDDLRKILDRVRKENRRVIEELRKILEDVERRNREAIERLERILRRVVDLMRKK

SEQ ID NO: 24088 - protein, 59 aa, Artificial Sequence
  Synthetic
EEVLKRVREEVDRVRRELDRINEDSERVLRDVARELERINREVRKRLKEVEKRLREAAK

SEQ ID NO: 24089 - protein, 60 aa, Artificial Sequence
  Synthetic
SEVEKIIKELREILERVREDNRKIIDDLRKILKEAEDTNRKVIKELKEILKDVSKLMKEK

SEQ ID NO: 24090 - protein, 59 aa, Artificial Sequence
  Synthetic
EELLKEAEKDVRRVKEKLDKINRDVREELKKVAEDVKRINDRSREELRRVKEELKKDSD

SEQ ID NO: 24091 - protein, 60 aa, Artificial Sequence
  Synthetic
KEVEKVIEELRKILDDARRENERLLRELEEILKRVEERNRKLLEDLRRILEEVRKKAKDI

SEQ ID NO: 24092 - protein, 59 aa, Artificial Sequence
  Synthetic
EEVVKRVEEELKKVKEDVERINKEVRDRLREVEERLEKINEDTERTLKKVKDELEETKR

SEQ ID NO: 24093 - protein, 60 aa, Artificial Sequence
  Synthetic
DELRDVLRRLREVLTELEKENRKSIEELKKLNEDVARDIKRVIDELRKLLKRVKEEIEKN

SEQ ID NO: 24094 - protein, 55 aa, Artificial Sequence
  Synthetic
EEVRKELEDVRRKAEKILRDNDERLKESNRHMEKLLREVKEELKRVRDAVEEARK

SEQ ID NO: 24095 - protein, 60 aa, Artificial Sequence
  Synthetic
DEVRDVIKKLKDLNDRLDDENKKSIEDLKRELERLERRNRDSIRRLEELLKDVADKIRRR

SEQ ID NO: 24096 - protein, 55 aa, Artificial Sequence
  Synthetic
KDVRKRLRESNEHMKELLKENKELLKRLEDEVKRILERNKKELDRVLRRAEELRK

SEQ ID NO: 24097 - protein, 60 aa, Artificial Sequence
  Synthetic
RSVEEVRKVLEELKREHEKISKKTEEVLEDLKRRHEEIIKRVRDVLREIEEDLRRIRSRV

SEQ ID NO: 24098 - protein, 59 aa, Artificial Sequence
  Synthetic
DEKVEKVIRELRRSVEDSKRRNDEAIRRLEESVRKSSDEVRRAIKELRDLLKKVRDTTK

SEQ ID NO: 24099 - protein, 60 aa, Artificial Sequence
  Synthetic
STVERVREEADRLRKEHERISDETRKVLRKLEEDHERISRRTEELIERIEREVRKIESRV

SEQ ID NO: 24100 - protein, 59 aa, Artificial Sequence
  Synthetic
DEKVKRVEEEVRRSVEESKKENKKVIDDARRSVKRSEDRNREVIKEVKRLLDTVRERAK

SEQ ID NO: 24101 - protein, 60 aa, Artificial Sequence
  Synthetic
STVEDVRRRADELRRRHKKISEETERVLRRIEEAVRRILEDLRRILKEIEDRVRELLSRV

SEQ ID NO: 24102 - protein, 59 aa, Artificial Sequence
  Synthetic
DEKVKEAKRRVTESVRKSKDRNRRVIEEVDRLLKRVEEEVRRVKEEAKELLREVAERTK

SEQ ID NO: 24103 - protein, 57 aa, Artificial Sequence
  Synthetic
SSVEKVIEDLRRISEKVKKRTEDVLREAEKILRRVEKDNKKVNDDARRIVEELERRG

SEQ ID NO: 24104 - protein, 59 aa, Artificial Sequence
  Synthetic
KRLVDRVREAAKDIEDENREVLRRVEEILRRIEEELKRSSDETEKAVREIKRRLDERAR

SEQ ID NO: 24105 - protein, 57 aa, Artificial Sequence
  Synthetic
EEVERVLEEIKRISTDVARRSKEVLKRARESSERVKRRTEEVLEEIRKTNEDVARRA

SEQ ID NO: 24106 - protein, 59 aa, Artificial Sequence
  Synthetic
KKVVDRLRKEVKRNEDENREMVREVEEEVRRLEKENEEAVRRAADIVRRSEEHLRERTR

SEQ ID NO: 24107 - protein, 60 aa, Artificial Sequence
  Synthetic
KEVEDLLREVEKSSEKVRELIERSIRELERILEKVAEEIRRSIEELEKILERVAEVAKRR

SEQ ID NO: 24108 - protein, 59 aa, Artificial Sequence
  Synthetic
EKIVKRVEDEIRRLMKKSDELLERSTKVVEDIKRELEKLLETSSRMAEDIKRKLEELRR

SEQ ID NO: 24109 - protein, 60 aa, Artificial Sequence
  Synthetic
SEVEKLIEELERILEEVARRLKKSNEDLRKILKEVAKRIKDSIRDLRRILEEVADELRRR

SEQ ID NO: 24110 - protein, 59 aa, Artificial Sequence
  Synthetic
ERIVEEVERAAEEIKRRLEELVRRSEKSVEEIERELRKLLKDSSDVVREIKKRLEDERR

SEQ ID NO: 24111 - protein, 60 aa, Artificial Sequence
  Synthetic
SEVEKLLKEVEDSSRKVEEDLRDSNRELKKILDEVADRIRKSIKRLEDILKKVAEDAKRR

SEQ ID NO: 24112 - protein, 59 aa, Artificial Sequence
  Synthetic
EKIVRDVERRVRELKERSRRIVEESERSAREIKRELKRLEDDSSRVVEDIRKKLEELAK

SEQ ID NO: 24113 - protein, 60 aa, Artificial Sequence
  Synthetic
REVEELIKRVEESSRDVERRLRESNEEVERSTRRVAEEIKKSIDRVREIVERVERKKERV

SEQ ID NO: 24114 - protein, 59 aa, Artificial Sequence
  Synthetic
EKIVERVRRVIEELKRRSDEIVKESERSVRRVEKETTELLEESSRAVERVERRLRELVR

SEQ ID NO: 24115 - protein, 60 aa, Artificial Sequence
  Synthetic
SEVEKLIEEVRRSSKKVEEDLDRSNRELEDILRRVAEELEKSNRELEKILKEVAERVKRR

SEQ ID NO: 24116 - protein, 59 aa, Artificial Sequence
  Synthetic
EEIVKRVEEEARRLKERSREIVKRSEDSAREITKALRKLVRDSEDSVRKIKEKLKEETR

SEQ ID NO: 24117 - protein, 60 aa, Artificial Sequence
  Synthetic
REVEELDKRLKESSTEVEERLRRSNREVEDSTRRVEEEARKSNEELREILERVAEDVKRR

SEQ ID NO: 24118 - protein, 59 aa, Artificial Sequence
  Synthetic
ERIVERVERSARELMRRSRDIVRRSKESIERLKKRTRDLVKESRESVEKIKRDLEELRR

SEQ ID NO: 24119 - protein, 59 aa, Artificial Sequence
  Synthetic
SEVEKLLKELEDSSKKVEDDLRKSNEELRKIVEEVADLIRRLNKELEEILREVRERMRR

SEQ ID NO: 24120 - protein, 59 aa, Artificial Sequence
  Synthetic
EEIVRRVEKIVRDLKRRSDELVRRSRKSVEEIRKELEELVERDRRSVERIKEELDKERK

SEQ ID NO: 24121 - protein, 60 aa, Artificial Sequence
  Synthetic
SEVEKLTKEVRDSSKRVEDELRKSNERLKESTDRVADEIRRLNKELKEILDKVAREVERR

SEQ ID NO: 24122 - protein, 59 aa, Artificial Sequence
  Synthetic
EEIVERVERDARKVKEDSKRLVEESEESVRRLKTDTERLVEEDKKSVDTIKEELKKLTK

SEQ ID NO: 24123 - protein, 59 aa, Artificial Sequence
  Synthetic
DEVEELRKELEDSSREVEELIRRLNKEVEKSTREVAKRVKDSNKRLDEILKKVAEEVKK

SEQ ID NO: 24124 - protein, 59 aa, Artificial Sequence
  Synthetic
REIVERVREEVEKLKKRSEDLLERDKESIDKLDKETKELVEESRKSVRDIERELKKLSD

SEQ ID NO: 24125 - protein, 60 aa, Artificial Sequence
  Synthetic
DEVEKLIKDVEDSSREVEERIRDLNRKAKKIVREVAERIRELNERLKEILDKVAEEVKRR

SEQ ID NO: 24126 - protein, 59 aa, Artificial Sequence
  Synthetic
EEIVKRAEKRIRELKKKSDELLKRDRDSMDRIKKELEKLTREDEESVRRIERELKRLAD

SEQ ID NO: 24127 - protein, 60 aa, Artificial Sequence
  Synthetic
SEVEKLIEEVRRSSEEVERRIKKLNDDVRRSTEKVEEDIRRLNEELKKILDEVAKEMERR

SEQ ID NO: 24128 - protein, 59 aa, Artificial Sequence
  Synthetic
ERIVRRVEKIIRDLKKRSDELLKEDRRSAEEAKRETDRLVEEDKRSVDEIRERLKELSR

SEQ ID NO: 24129 - protein, 60 aa, Artificial Sequence
  Synthetic
DEVEELLRRVEEIVERVAKRIEELNRRLEEILEEVARRSTKSIKELEDILRKVAKEMERR

SEQ ID NO: 24130 - protein, 59 aa, Artificial Sequence
  Synthetic
EEIVERVERRIRELKKRLEKLVRDDEESVKEIRKKLEELVKRSSDVVERIKRELDKLRK

SEQ ID NO: 24131 - protein, 59 aa, Artificial Sequence
  Synthetic
SEVEKLLRELRESSREVEERIRKLNRELEKIVRDVDRESARSIEELKRIAEEVAERAKR

SEQ ID NO: 24132 - protein, 59 aa, Artificial Sequence
  Synthetic
ERIVKEVEEEVRRLKKRSTKLLEDDRKSVEDIKERLKELVRRSSEVVKEIEERLKRLEK

SEQ ID NO: 24133 - protein, 60 aa, Artificial Sequence
  Synthetic
SEVEDLLRRVRESSKEVEERIRKLNDELRKSTKEVEDRSRRSIERLDRIVEKVAREVERR

SEQ ID NO: 24134 - protein, 59 aa, Artificial Sequence
  Synthetic
EKIVRDVEREVRRVKERSDRLLEEDRKSVEELKTRTDRLLEESSKRAEDIKRKLKELEK

SEQ ID NO: 24135 - protein, 60 aa, Artificial Sequence
  Synthetic
SEVEKLLREAKESSREVKDRSKKSIDELRESTKTVERLIRDLNRKLKEILDRVADDMRRR

SEQ ID NO: 24136 - protein, 59 aa, Artificial Sequence
  Synthetic
EKIVRRVEEIVRRLKKESKDLVEESTRVADELRRRTDRLVEEDERSVRKIKEDLDRLRK

SEQ ID NO: 24137 - protein, 60 aa, Artificial Sequence
  Synthetic
SEKEEAKRRARELEKRTDELLEESTRVNEESKRHLKELLDESRRTAKRVKEEIDKLLKEK

SEQ ID NO: 24138 - protein, 56 aa, Artificial Sequence
  Synthetic
VDTLLERVDRSSKEVADRMRKSNEEVKDVNRRVAKALKDSNRDVERVLEDVARKIK

SEQ ID NO: 24139 - protein, 60 aa, Artificial Sequence
  Synthetic
SEKETARKVIEELRKETERLLRESTKTNEDSSRHAKELLKRSEDVAREIEERIDRLLEEK

SEQ ID NO: 24140 - protein, 56 aa, Artificial Sequence
  Synthetic
IEEVIKRLEDSSRDVERRLRKSNEDVKRVNKEVADRLKESNDRLREELKKVEDDIR

SEQ ID NO: 24141 - protein, 60 aa, Artificial Sequence
  Synthetic
DEKEDAERKIRRLEERTKKLLDDSTKTNKESRDHLRKLLADSEKTARDIKRAIKKLLDDK

SEQ ID NO: 24142 - protein, 56 aa, Artificial Sequence
  Synthetic
VDTLLTEVTDSSRRVEEELKRSNDEVRRVNREVAERLKKSNRELEEVLRKVAEDIK

SEQ ID NO: 24143 - protein, 60 aa, Artificial Sequence
  Synthetic
SERERAEEEAKKAKKEAKRLLDESTKANEDSKRHADKLLEDSKRAAEDIKRKAEDLLRKK

SEQ ID NO: 24144 - protein, 56 aa, Artificial Sequence
  Synthetic
ARRAIEEVRRALKEAADASRDLNRRAKEANERAAKASEELNKRAEDALRRASEEIR

SEQ ID NO: 24145 - protein, 60 aa, Artificial Sequence
  Synthetic
SEKEEVKKRVDEIKERLKRLLDDSTRTNEESRKHIEDLLEESKKEIDKVRKDLERLLRKK

SEQ ID NO: 24146 - protein, 56 aa, Artificial Sequence
  Synthetic
VDTMTRKVEEVLRDVAEKIKELNRRVEEANKDMARESERLNREVRDVLRKVAKDIE

SEQ ID NO: 24147 - protein, 60 aa, Artificial Sequence
  Synthetic
SDEDRAREDLKRIKEELKRLLRESTEVNKESEKHIRKLLRESEETIRRLKKAIDDLLRKK

SEQ ID NO: 24148 - protein, 56 aa, Artificial Sequence
  Synthetic
IETILRRLERVLKEVEKKSRELNRRVKEVNEKVRRDIERLNKEVKDVLKTVAERIT

SEQ ID NO: 24149 - protein, 61 aa, Artificial Sequence
  Synthetic
DEKERAEERIRELKKRTEELLRESTRVNRESKEHAKELLKRSEDTIRELDERIRRLLERKK

SEQ ID NO: 24150 - protein, 56 aa, Artificial Sequence
  Synthetic
VDTVLARLEESSKEVEDRSKRLNEEVKKVNEEVAKRIKELNEEVERVLRRVAEEIE

SEQ ID NO: 24151 - protein, 59 aa, Artificial Sequence
  Synthetic
SLKEELREKVRKVKEDSERLLRDLERTVKKVREDSKRILDRNRETAKEIERRIRELERN

SEQ ID NO: 24152 - protein, 59 aa, Artificial Sequence
  Synthetic
EELVRKLRKELDDSLKRTKELVDRLKEDLERSLRDSEELARRLDRELEDVLRRIEDEAR

SEQ ID NO: 24153 - protein, 59 aa, Artificial Sequence
  Synthetic
SLLETLKEIVRRVERESARILEDNRRTVTRAKEESKKILDRNAKTVDDLRKEVERLKTE

SEQ ID NO: 24154 - protein, 59 aa, Artificial Sequence
  Synthetic
EELVRRLVEELEKSLRTTERLARELDRKIKESLDTSEELARRLDKRLEEVLKDVKRRAE

SEQ ID NO: 24155 - protein, 59 aa, Artificial Sequence
  Synthetic
RLEEELKKTVDRAREEVKRLLDRDRESVDDLRRAVEEILKTNRRTVEKLRKDLTDLRRN

SEQ ID NO: 24156 - protein, 59 aa, Artificial Sequence
  Synthetic
EKLVRELIEKIKKVLDEVRRLSEKLNEDLREILERVKRLADKLDEELKRMLEKVEETAR

SEQ ID NO: 24157 - protein, 61 aa, Artificial Sequence
  Synthetic
DDVERVKRDIDRLLEKVTRENEKVKEKMKELLDRAREVNRKVKEDIKRLLKEVEDVARREG

SEQ ID NO: 24158 - protein, 58 aa, Artificial Sequence
  Synthetic
EDVRDLERRLREVEEEARKLSEDVRRVLEEVRKELERLSRDTERVLKRVREEIRKIEK

SEQ ID NO: 24159 - protein, 61 aa, Artificial Sequence
  Synthetic
SEVEEVIRRVRKLLKDAKDLNEEVKRRLKELLDRVKRVSEKTKEDIKRLLEEVERVVRTKG

SEQ ID NO: 24160 - protein, 58 aa, Artificial Sequence
  Synthetic
DLAERVRDVLRRVAEAAKELSKDTKRVLDEVKKAIDELLKDNKRTVEEVEKEAKKTLK

SEQ ID NO: 24161 - protein, 61 aa, Artificial Sequence
  Synthetic
DEVEKVKKTLKKLLEDARRRNEEVRKEIEDLDRELERLNRESKKRIEDLLEEVKRVVDRDG

SEQ ID NO: 24162 - protein, 58 aa, Artificial Sequence
  Synthetic
ELVRELERVLDTVRREAERLSRKTREVVDESRRRNKKLLEEDERVVRKVVEDAERKLK

SEQ ID NO: 24163 - protein, 61 aa, Artificial Sequence
  Synthetic
DEVKKVIDDIKDLLRRVEEVSRRVNKELERLLREVREVNKDVKRKLEELLRRVKEVVRRDG

SEQ ID NO: 24164 - protein, 58 aa, Artificial Sequence
  Synthetic
DLAERVRKVLEDVTRAAKELIKRDKKSLEDVKREIEKLSRDVKRVLEKVAEDAKDTLR

SEQ ID NO: 24165 - protein, 60 aa, Artificial Sequence
  Synthetic
SEEEDLARVVERVERDLKRLDDDNKRVLDESRRRNEELVKRTAEIVERVRRELERLRREG

SEQ ID NO: 24166 - protein, 56 aa, Artificial Sequence
  Synthetic
VEEVKRTMEKLLDDVRKANEDSKREIEKSDDEVRKRNEEVVRDIERLLKEVEERAR

SEQ ID NO: 24167 - protein, 60 aa, Artificial Sequence
  Synthetic
SEEEDLRRRAEEVHRRNEELLRDNERTVKKVHDRNRELLEDLRRVVERIERELRRLEEEG

SEQ ID NO: 24168 - protein, 56 aa, Artificial Sequence
  Synthetic
VEEVKERIDRLHEELEKLSRTTKEKLKELHKRLEDVVREVKRRAEELLREIKERAD

SEQ ID NO: 24169 - protein, 60 aa, Artificial Sequence
  Synthetic
SEVEEVRKVVEEVKRELRRLSEDSRRVVEEIVEADKRLSEKNETSVREVKKALKKLKDDG

SEQ ID NO: 24170 - protein, 62 aa, Artificial Sequence
  Synthetic
KDAEELVRDVIRRAREVLKRVEDVHRKVKKDLKKVHDDNKKISEDIDRRLEEVLRKVEEDDR

SEQ ID NO: 24171 - protein, 60 aa, Artificial Sequence
  Synthetic
SEVEDVKRKVREIEKADEELSKRNEDSARESKKRLKEWSDDTKEVVERVRKRLKDLEDEG

SEQ ID NO: 24172 - protein, 62 aa, Artificial Sequence
  Synthetic
EEAERLVREVTKEMKDVHDKNKKLSEDIDKRVEDTNRRLKEVHERVKEEAKKVVRDLEETAK

SEQ ID NO: 24173 - protein, 60 aa, Artificial Sequence
  Synthetic
SLVETVEDVLREVEERLRKLLRDNEESVERIKKRDEDLSKENEESVKRVEDTLDELRERG

SEQ ID NO: 24174 - protein, 60 aa, Artificial Sequence
  Synthetic
VEELVRKVIEDARRLLDDVRRKSERLDREAERVHRENKKLSEDLDRRVKTVVDDVRERAR

SEQ ID NO: 24175 - protein, 60 aa, Artificial Sequence
  Synthetic
SLVEEVEKEARDIERRDDELSKRNEKVARDIEERDRRLSDEVREVVKRVKRELERLVESG

SEQ ID NO: 24176 - protein, 60 aa, Artificial Sequence
  Synthetic
AEKLVRRVIKDLRKLHKENEDLSREIDKRLEDAHKRNRDLVEEVKKRMERVREEVERAAR

SEQ ID NO: 24177 - protein, 60 aa, Artificial Sequence
  Synthetic
KEKEDVKKVVEDIERADKKLSEDNRRVVKRIEEADRKLSKENKESVERAKKRLDDLERRG

SEQ ID NO: 24178 - protein, 62 aa, Artificial Sequence
  Synthetic
EEAEELVRRVIKEMEEVHKRNRDLSKRLDDELKRIHKENEDRLRRLDEEIEKVVKKVEDDAR

SEQ ID NO: 24179 - protein, 60 aa, Artificial Sequence
  Synthetic
SLVEELRKDVEEIKKRLKRLVEENEKVVREVTEADKKLSKELEDEARDVKRALEELRRRG

SEQ ID NO: 24180 - protein, 62 aa, Artificial Sequence
  Synthetic
EEVEELVRRVREDMERVVREVEKVSRDLDREIRRVHRENRELIEDVKRKARKVLRDAEEEAR

SEQ ID NO: 24181 - protein, 60 aa, Artificial Sequence
  Synthetic
KIVEDVEKVVKEVDDRLKKLVDDNERKVREIIRRDEELSEKNEKSVRDVKEELKRLAEEG

SEQ ID NO: 24182 - protein, 62 aa, Artificial Sequence
  Synthetic
EEVEKLVREVIDRMRRVVREVEEMSKRLDEELEEVHRRNRETLTRIDEEAKKVVDDVDRRAR

SEQ ID NO: 24183 - protein, 60 aa, Artificial Sequence
  Synthetic
SVRETLEEVLRRIAEAIDELIKTLEKVLEESRREIERWKKENEDSLREIKKKLEDLEKKI

SEQ ID NO: 24184 - protein, 59 aa, Artificial Sequence
  Synthetic
EEKAKRALEEIKRLLERVKKRVEEALEEIKKSNKEAADIVRDIDRRLEELLRTVADKTR

SEQ ID NO: 24185 - protein, 57 aa, Artificial Sequence
  Synthetic
DEVEEVIKTSREINDRVRRELERVLRRSEEIIEEVAKSIEEVIKESEDIIRKVEKDG

SEQ ID NO: 24186 - protein, 59 aa, Artificial Sequence
  Synthetic
EELKRKIRDVLRDDERAARKWVRDLEEVNKRTEDKIRELLRKLEEVNEKTERDIRRREK

SEQ ID NO: 24187 - protein, 57 aa, Artificial Sequence
  Synthetic
EEVERVIEEIKKLLKDVAELVERVIKEIRKILDDVAKENKRLLDESRKIIKEVAERG

SEQ ID NO: 24188 - protein, 59 aa, Artificial Sequence
  Synthetic
EEVKRKIRKVLKEIKEEIEKLLKKLRDALRDVEEKIRDLTRRAREVNEKSREDLERRKD

SEQ ID NO: 24189 - protein, 57 aa, Artificial Sequence
  Synthetic
DEVEDVIRRLEEIIREVEDRLRKILETSKKIIKEVEDENRRVVTEIERILREVEKRA

SEQ ID NO: 24190 - protein, 59 aa, Artificial Sequence
  Synthetic
EELKRRIEEVLERLRRKIERLAKELKDVNDESEREARRLTEEVKRVLEEVARRIKEAAE

SEQ ID NO: 24191 - protein, 56 aa, Artificial Sequence
  Synthetic
REVEEVRKKIEEDIDRVDKELKEVLETSRDILRRVAKENEDVLRDLERLVDEVRRD

SEQ ID NO: 24192 - protein, 59 aa, Artificial Sequence
  Synthetic
EELKKKLEKVVRDLSKRLEELLKELEKVNEEVKRRLERLTEEVRKVLEEITKKLKERAR

SEQ ID NO: 24193 - protein, 57 aa, Artificial Sequence
  Synthetic
SKVEEVMRRLKEILKRVAEELEKVLTESEKILRDVADENRRVMEESRKILKDVAERG

SEQ ID NO: 24194 - protein, 59 aa, Artificial Sequence
  Synthetic
EEVKKKIDKVLEDVRKELDDLRRKLEEVNKRIEEEIRRLTEDVRRVNDEIRKRAEDRKR

SEQ ID NO: 24195 - protein, 60 aa, Artificial Sequence
  Synthetic
SLREKADEVVKRIKERLDRLEDKSREVVKDSRRKLREWYEKSKRAVEDIETKLDELRKDL

SEQ ID NO: 24196 - protein, 59 aa, Artificial Sequence
  Synthetic
KDMVEELIRELEKIVTDVAKKVEDTIEESRKINEEVAKRVEDTIKRLEDILRDVARRVK

SEQ ID NO: 24197 - protein, 60 aa, Artificial Sequence
  Synthetic
SLREKVDKVVEEIKRKLDKLLEDSERVVEKSERDLRRWLKEAEEVVREIEKTLKELEKRA

SEQ ID NO: 24198 - protein, 59 aa, Artificial Sequence
  Synthetic
KDVVEDLIRELEEIVRRVAEEVRTTIEDLRKINDEVREKVKRLIEELKKILDDVAEEVR

SEQ ID NO: 24199 - protein, 60 aa, Artificial Sequence
  Synthetic
SLEEKAREVVKEIRRRLDELLRKSHDVVREIEERLDKLEKESEDAVREIEKRLDELAKRI

SEQ ID NO: 24200 - protein, 59 aa, Artificial Sequence
  Synthetic
AKVVEKLIKELRDILREVAERVERTIRRLREIVKRVERKVERSIEEMERIVREAEEETR

SEQ ID NO: 24201 - protein, 60 aa, Artificial Sequence
  Synthetic
SLREKVDEVVKRIEKRLEELIRKSRKANEDIRKKLEELIKKSEDVVRKIKRELEELKRRV

SEQ ID NO: 24202 - protein, 59 aa, Artificial Sequence
  Synthetic
REVVEDLIRELEEILRKVAEEVEDTIRRLEKILKEVAERVERTIKDLEDIVRDVAEKVK

SEQ ID NO: 24203 - protein, 60 aa, Artificial Sequence
  Synthetic
SLREKVKRMVEEVKRELDELEKESNRAVERVERELEKLIRKSERVNERIRERLKELAARS

SEQ ID NO: 24204 - protein, 59 aa, Artificial Sequence
  Synthetic
DKVVEKLIKEVRDIVKKVAEEVKKTIEDVERKVKEVAERVEDTIRRLDEAVKEVEERVR

SEQ ID NO: 24205 - protein, 60 aa, Artificial Sequence
  Synthetic
SLREEAERVIREVREDLDRLRRESKKVNDRIRRTLDELRKRSDDAVRDIKEKLKELAKRT

SEQ ID NO: 24206 - protein, 59 aa, Artificial Sequence
  Synthetic
KDVVRELAERLKRLLEEVEKRVKDTIRELEKIVEEVRKRVEDTIRRLEEVLDKVAKEVT

SEQ ID NO: 24207 - protein, 61 aa, Artificial Sequence
  Synthetic
SIEEELKKVLKEIEDRVRKSDKENKEASERIKRTVEELERRLREVLRRIEEAVRKLVREKG

SEQ ID NO: 24208 - protein, 59 aa, Artificial Sequence
  Synthetic
EKKVKEVVDELRKLLRELEKLSEESNRKLKKLTDDIEKLVRDVEKELRKLLKELAEKIK

SEQ ID NO: 24209 - protein, 60 aa, Artificial Sequence
  Synthetic
SVEERLKRVLERAREEIKRLLDELERVLEESRKEIKKLSEDLTRANEDTRREIEKLAREI

SEQ ID NO: 24210 - protein, 59 aa, Artificial Sequence
  Synthetic
ERIVKKVEEEIEELVRRVEKRVREVKKRMEDSNREVRKANEEVKKRSEDLLRKVRRDAE

SEQ ID NO: 24211 - protein, 60 aa, Artificial Sequence
  Synthetic
RVRDELREVLRKAREDIKRLSDKMREVLRESEEKIKRLSDDLRRVNEETKKEIDRLRKEI

SEQ ID NO: 24212 - protein, 59 aa, Artificial Sequence
  Synthetic
KEIFRKVEKEIEDLLEEVRDVNRKIEEEARRSNEDVERVNREIKKRSEELLRDVEKKTE

SEQ ID NO: 24213 - protein, 60 aa, Artificial Sequence
  Synthetic
SVREELKKALDRVRESIRRLSEELREVLERSEDTIRRLVEDLERVNEETRREIEDLARKI

SEQ ID NO: 24214 - protein, 59 aa, Artificial Sequence
  Synthetic
ERIMKEIEKRIEDLEREVKEVNREVIERAEESNRRVEELVREAKKRSRELLKRVREEAK

SEQ ID NO: 24215 - protein, 60 aa, Artificial Sequence
  Synthetic
SVREDLERALRRAAEEIEKLSRDLKRVLEESRKNIERLRRDIERMNEETEKEIRRLAREI

SEQ ID NO: 24216 - protein, 59 aa, Artificial Sequence
  Synthetic
EEDAEEIKTRIKELIDRVRRVNEEVKERMKKSNEEVEEVVRRVKEESKRLLERVEEDVR

SEQ ID NO: 24217 - protein, 60 aa, Artificial Sequence
  Synthetic
SLREDLRRVLERARDELRKLSKELKEVLKRSRDNIRKLSEDVKRANERTEEEIRRLTKEI

SEQ ID NO: 24218 - protein, 59 aa, Artificial Sequence
  Synthetic
DEIFKRVKKEIKELVDRVREVNKDVIRRMKKSNDEVKRENEKVIRESEKLLKDVEDARR

SEQ ID NO: 24219 - protein, 60 aa, Artificial Sequence
  Synthetic
SVRERLEKVLKEVEDSIKELSDDLRRVNKRTEEEIRRLAEDLERVLERIEREIRKLAKEI

SEQ ID NO: 24220 - protein, 59 aa, Artificial Sequence
  Synthetic
EEIAERVERTIRKLEDDVRKVNEDVKRRSRELLERVARLVERVKEEAEKLLEDVKRKAD

SEQ ID NO: 24221 - protein, 60 aa, Artificial Sequence
  Synthetic
SLREDLERVLEEIERELKELSDDLRRMNEETEREIRKLSDDLRRALEKIRDEIRKLAEEI

SEQ ID NO: 24222 - protein, 59 aa, Artificial Sequence
  Synthetic
EEIFRKVKEEARRLVREVEEVNKEVKKRSRDLLREVRKVNEDVKREIERLLRKVAKDAE

SEQ ID NO: 24223 - protein, 60 aa, Artificial Sequence
  Synthetic
SMREDLRRVLEEAEKKIRKLSKEAKDANRETEKEIRKLSEDVKRVNKESKDEIDRLAEEI

SEQ ID NO: 24224 - protein, 59 aa, Artificial Sequence
  Synthetic
KEIAEKVKREIEKLVRDVERVNREIIERSEKLLREVREENERVKRESRRLLKEVEKAAE

SEQ ID NO: 24225 - protein, 60 aa, Artificial Sequence
  Synthetic
SVRETLKKVLEDVRRELKKLSDKLRKVLEDSRRNVKRASDKLREVLKRVKEEIERLRREI

SEQ ID NO: 24226 - protein, 59 aa, Artificial Sequence
  Synthetic
EEIAKRIIEEIKKLLDRVREVNEDVIRRMKKSNEDLDRRNEEVRKRIEDLLEKVARDAK

SEQ ID NO: 24227 - protein, 60 aa, Artificial Sequence
  Synthetic
SLEETAKEVIERSEDHLRRLEETNRKVVEDSERHLDDLTRRIKKVVEDIKKRLDEIEKRG

SEQ ID NO: 24228 - protein, 60 aa, Artificial Sequence
  Synthetic
AEELLRTVVKEIEDANRRVEEVSRKNTEDIKEWNKRLEEELRRVVERARRELKKVEDAAR

SEQ ID NO: 24229 - protein, 59 aa, Artificial Sequence
  Synthetic
SLEETAKRVIEESRKHLDRLRRENERVVKEIRDALRELEKKVEDVVRRIAEELERIRKE

SEQ ID NO: 24230 - protein, 62 aa, Artificial Sequence
  Synthetic
EEAEDLLRKVIEDIKELNRELERVSRKNIEDLRRWLEEVREMVKRVEEKAKRVLEELREAAK

SEQ ID NO: 24231 - protein, 60 aa, Artificial Sequence
  Synthetic
SLEETIEKVVERSKRNLEKLRREIRKVVKESDENLKDVERRAREVVEEIKKALEDIRRKG

SEQ ID NO: 24232 - protein, 62 aa, Artificial Sequence
  Synthetic
EEAEELLRKVIKESEDLNRRLREEVKKVVREIEEANKRVNDTVRKMEEALKKLLDDLREKAR

SEQ ID NO: 24233 - protein, 60 aa, Artificial Sequence
  Synthetic
SLEEDMKRVVDESRRNLERVEKENRDVVKESRDNLKKVEDDIRKVVKDIRDELEKIRKRG

SEQ ID NO: 24234 - protein, 62 aa, Artificial Sequence
  Synthetic
EEAEELVRRVKETSKRVNEELDKTAKKNVDDIKDWNRRVNEKVKKVKEDAERVLRELEETAR

SEQ ID NO: 24235 - protein, 59 aa, Artificial Sequence
  Synthetic
SLEETITKVVEESKKNIDRLLEEVRKVVEDSRRDLDRVIDEARKVVEKIDRELKRIEKR

SEQ ID NO: 24236 - protein, 62 aa, Artificial Sequence
  Synthetic
EEAEELVRRVKKRSEDVNKKLDEDVEEMKRRSEKLNKDINKDVDRVRKRLEEVLKRLREAAK

SEQ ID NO: 24237 - protein, 60 aa, Artificial Sequence
  Synthetic
SLKDEIKKVVDDSRRNLEEVKKEITRVVKESRERLEELERDIERLVEKVTRELDRIEEEG

SEQ ID NO: 24238 - protein, 62 aa, Artificial Sequence
  Synthetic
EEAKELVEEVIRRSREVNRDLNRRVREVEKESRDANERVKRRVEEVKRRAREVLERLKKAAE

SEQ ID NO: 24239 - protein, 60 aa, Artificial Sequence
  Synthetic
SLEEDAKRMVDTNEDRVREWERKIDKVVKDSEKRLRELREDAERMVREIKKELEKIRTEG

SEQ ID NO: 24240 - protein, 60 aa, Artificial Sequence
  Synthetic
AEELVRRLKKASEDSNEKVARLIEEVIKRSKDVNDDLERDLREVKKRLKDVLKRLKEKAK

SEQ ID NO: 24241 - protein, 60 aa, Artificial Sequence
  Synthetic
SLEEDAKRAVEESKRTLRELEEENKKVVEDIRRALRRLEEDIKRVVEEIRRELDRIRREG

SEQ ID NO: 24242 - protein, 60 aa, Artificial Sequence
  Synthetic
AEELVRRVKKTIEDVNRKVAKVVKENIKRLREWLKRVEERLKEVKDRLRKVLEDVERAAK

SEQ ID NO: 24243 - protein, 59 aa, Artificial Sequence
  Synthetic
DVEEDVKRVADDNRRELERWRRDVKKVADEVKDRSRKLERDVERRIREIEKTLEDLRRE

SEQ ID NO: 24244 - protein, 59 aa, Artificial Sequence
  Synthetic
KEVVKRLKEESKKSNEDVARRVEKLKEELERSTREVERAVRELKKELDEVVREVKERAK

SEQ ID NO: 24245 - protein, 60 aa, Artificial Sequence
  Synthetic
SIEERLDKLLRDVKRALEELEERIRRSNKRLREAVEKLKKEVEDSNRELDKAVKEVLRRK

SEQ ID NO: 24246 - protein, 59 aa, Artificial Sequence
  Synthetic
EEAVRTAADLLRRVLERVKRLAEELHRHNKEVLDEARKIARDLHRLNEEVLRRVEEATK

SEQ ID NO: 24247 - protein, 60 aa, Artificial Sequence
  Synthetic
SIEEDLKRLLDEVRKRSKDLKEEVKRSNDRVREDLKRLKEEIDRLLEEARRRLEEIIRRK

SEQ ID NO: 24248 - protein, 59 aa, Artificial Sequence
  Synthetic
KELVDRARDKIRESLRRSEKIIEELHEHNKDALRRVREEIKRLKDKLKKVVEEVERATR

SEQ ID NO: 24249 - protein, 57 aa, Artificial Sequence
  Synthetic
DSVERVKEESERTNREIAKLSKKVEDETRKVLKDLEDISRDTERRSREVLERARRDK

SEQ ID NO: 24250 - protein, 58 aa, Artificial Sequence
  Synthetic
ELVRELEEVVRENEERVRRLIERNKKLVDDARKRVEELVRRNDKIVKEIEKVVRDIKT

SEQ ID NO: 24251 - protein, 57 aa, Artificial Sequence
  Synthetic
KSDEEVEKLIREVLKRIEELSREAEKLTDEVRKLLKEISDRVEERSRDVLDKIRRTN

SEQ ID NO: 24252 - protein, 58 aa, Artificial Sequence
  Synthetic
ELVRKLEKLLEDAERRVRELVKRNKEVVERVKRTVDELKARNKKIVEEIKKVMEEITR

SEQ ID NO: 24253 - protein, 57 aa, Artificial Sequence
  Synthetic
RELEEVEKKVRTVLEEVRRISEKAEELSRRVLEEARKISEDNEREVRRVVEDVRREN

SEQ ID NO: 24254 - protein, 58 aa, Artificial Sequence
  Synthetic
DLVERLKELVKKVEDEVRRLVKRNKDIVDDIRRRVEELVRRNKRITDEVRKEADKLRR

SEQ ID NO: 24255 - protein, 60 aa, Artificial Sequence
  Synthetic
SELEKVKKEIRELLEEVRKISKESEDRSRKSNDELHKSSEEVEKRIRDLLRELEKIVREL

SEQ ID NO: 24256 - protein, 59 aa, Artificial Sequence
  Synthetic
KDVVKELREVLERAEREARKLIKRNDEILKESEKNARDLIRRTEELLRRAKKRVDELKK

SEQ ID NO: 24257 - protein, 60 aa, Artificial Sequence
  Synthetic
SDVEEVKKEIARLLEELKRTTDKVKEDSDRSNEEVHRSSEKVKKDIEKLLDELRKVVEEL

SEQ ID NO: 24258 - protein, 59 aa, Artificial Sequence
  Synthetic
REVVKELEDVLKRAEEVVERLEEKTRRILEESRKNIERLKRETEEMLKRAEDEVKKLKD

SEQ ID NO: 24259 - protein, 60 aa, Artificial Sequence
  Synthetic
SLVDRVRELIERLLRRLEEIVREVEERLRRSNERLHESSADVERLIRELLERLRDIVRKL

SEQ ID NO: 24260 - protein, 59 aa, Artificial Sequence
  Synthetic
EDVVRELEELLRRAKERVDELKKRLEELLKESREDVERLKKKTDEALKRAEEEVEKLRK

SEQ ID NO: 24261 - protein, 61 aa, Artificial Sequence
  Synthetic
RDLEEVKKRIDELLKRVRETTKRVEDELRRSNKELHESSRRVEEEIKKLLEELEDVFRKVK

SEQ ID NO: 24262 - protein, 59 aa, Artificial Sequence
  Synthetic
EELVRTLEDMLRRAREEIEKLKEKTRKLLEDSERDVKRLIERTTEVLKRARERVEELKK

SEQ ID NO: 24263 - protein, 61 aa, Artificial Sequence
  Synthetic
SELEEVKKRIDDLLKRLRDIVDTVRKELRKSDKELHDSSKRVEEEIKKLLEELRRIVETLK

SEQ ID NO: 24264 - protein, 59 aa, Artificial Sequence
  Synthetic
REVVETLRRVLKRAEDDVRRLLEELRELLERSKRNVERLIERTKELLKRAEDEVKKLED

SEQ ID NO: 24265 - protein, 61 aa, Artificial Sequence
  Synthetic
SLLEKVEEEVRRLLKRLRDIVEEVRRLLEESNERAHRSSKKVKEDIDELLKELEDVVRRVK

SEQ ID NO: 24266 - protein, 59 aa, Artificial Sequence
  Synthetic
KDLVKTLEDILERAEREVKKLEDRLRKLLEDSKRNAEELIKRTEDVLEEALRRVEELKK

SEQ ID NO: 24267 - protein, 59 aa, Artificial Sequence
  Synthetic
SEAERVREILKDAEKKIRDILRRLREINRESARRIEDIKRKLDEILKRNEDDVRRLEKD

SEQ ID NO: 24268 - protein, 56 aa, Artificial Sequence
  Synthetic
VEDAERTVRELIKRVEEALERAERASRELIKTVEKVLEEVERRNRKSNEELKEATR

SEQ ID NO: 24269 - protein, 60 aa, Artificial Sequence
  Synthetic
SLEEEAKELVKRVRDELRKIERTIEKIVEDSRRRLEENRKRNKELIERVEKELRELKKRV

SEQ ID NO: 24270 - protein, 60 aa, Artificial Sequence
  Synthetic
ARDILREAKKMLEKVLRDLRRVLEELRKENEKVLRELEEISKETEDRLREVLRELRERTR

SEQ ID NO: 24271 - protein, 57 aa, Artificial Sequence
  Synthetic
SVEDEVREVAKKIRRILEKLKRELDRHSKKIEDILEEIRDKNEKAKEEIEEVLRRRL

SEQ ID NO: 24272 - protein, 59 aa, Artificial Sequence
  Synthetic
KEDVERVKRELEKVLRELAEEVRESLERVSEVAERLKRENDEVNDRLKKMLEDLLRKAT

SEQ ID NO: 24273 - protein, 56 aa, Artificial Sequence
  Synthetic
DEVEEVIRRVEESNKRVNEENDRVVRESKEIVRKVEEDNRRAIKESEEMLDRVAKD

SEQ ID NO: 24274 - protein, 56 aa, Artificial Sequence
  Synthetic
EEDLRRVVDKSRKNVEEVERKNRDVLRRIDKRAKELEDRNREVLKKIEKTIRDLEK

SEQ ID NO: 24275 - protein, 56 aa, Artificial Sequence
  Synthetic
SEVDEVIRRVEKSNKDVNDENKRVIDRSKELNREVNERNKEAIKRSRDLADEVRRD

SEQ ID NO: 24276 - protein, 56 aa, Artificial Sequence
  Synthetic
EERLREVVKRSEDNVRKVEEDNRRVLEESTRNVKEVKERNEKVLEEIRKTLEDLER

SEQ ID NO: 24277 - protein, 56 aa, Artificial Sequence
  Synthetic
SEVDKVRKELEDMAREIEKRAEDVIREIKRSNEEVNRTNEKVIRDSERMLEKAERD

SEQ ID NO: 24278 - protein, 56 aa, Artificial Sequence
  Synthetic
EERLDRVREKLERIVREIEDRLRKVLEDSRRNVEEVRRRNEEAVKKIRRILEELER

SEQ ID NO: 24279 - protein, 56 aa, Artificial Sequence
  Synthetic
DEVDDVIRDVDRTNEEVERENRRVIEEVRKSNEEVNKKNADAEKRSREMAERAAED

SEQ ID NO: 24280 - protein, 56 aa, Artificial Sequence
  Synthetic
KEKLDRVLERSKKTVEELEKRNREALDRSRRNVEEVEKRNREVVKEIAERVRRLKK

SEQ ID NO: 24281 - protein, 56 aa, Artificial Sequence
  Synthetic
SEVDKVVEDVKRMLKEVEDRNEKVIRDVEKMLREVEEKNKRVIEDSERVAKEAADD

SEQ ID NO: 24282 - protein, 56 aa, Artificial Sequence
  Synthetic
KEKLDKVLEEIREIVKRLEDRNREALRRIKEIVDRLEKRNRKVVEDVERIVREIER

SEQ ID NO: 24283 - protein, 56 aa, Artificial Sequence
  Synthetic
SEVDEVIKRIEETNRRVEEMNKDAIRRVKESNKRVEERNKEVIERSKKLIDDVRRD

SEQ ID NO: 24284 - protein, 56 aa, Artificial Sequence
  Synthetic
EERLRKVLKDSERTVKELEKRNRRVLEESDKEVKRLEKENRDVVDEIRERAKEIER

SEQ ID NO: 24285 - protein, 56 aa, Artificial Sequence
  Synthetic
SEVDKVITELEKMLRRVKEENKRVIDESRRALEEVEKRNREVIERSDEMARRAAED

SEQ ID NO: 24286 - protein, 56 aa, Artificial Sequence
  Synthetic
EERLREVLERIARRVRELEERNKKVVKEIEERVRELERRNREVVKKIEEKVKRLET

SEQ ID NO: 24287 - protein, 56 aa, Artificial Sequence
  Synthetic
DEVRKVIKELRDELRRVEELNKEVIDRSRKLVEDIARESKEVIERSRKLLDDVRKD

SEQ ID NO: 24288 - protein, 56 aa, Artificial Sequence
  Synthetic
REDLERALKEIEETIRRLEKRNRDVLKEIEDEARRLEEENRKVLKEARKIVEDIKT

SEQ ID NO: 24289 - protein, 56 aa, Artificial Sequence
  Synthetic
SEVDDVTRKLERILEELTETSERVVRTSRRVAEELEKRSKEAVERSRKLAEEVARD

SEQ ID NO: 24290 - protein, 56 aa, Artificial Sequence
  Synthetic
REKLERVLEEIRRRIEELSEKNRKVVKDIREIVRKLTERDEKVVREIKKIVDDIET

SEQ ID NO: 24291 - protein, 56 aa, Artificial Sequence
  Synthetic
SEVDEVTREVEELIREVEKLSEDVIRTSKELAKRAEKLSREVIKRSEELIDEVRRD

SEQ ID NO: 24292 - protein, 56 aa, Artificial Sequence
  Synthetic
KKKLEDVLREIAKKVREIEERDRKVVEEIREILKRLEDENREVLKKIRRIAEEIRR

SEQ ID NO: 24293 - protein, 56 aa, Artificial Sequence
  Synthetic
DEVRKVIKELEDRLREVEKKSKDAIDTSREMLKRVDDENKDVKRRAEEILKRVDED

SEQ ID NO: 24294 - protein, 56 aa, Artificial Sequence
  Synthetic
EEELRKLLEDIREKVERIVKRDEDVVREIEEEARRLADENRKVLEEIERIIRELER

SEQ ID NO: 24295 - protein, 56 aa, Artificial Sequence
  Synthetic
REVDEVTRRIKELNDELERRVRRAKERIEELNKRVNREDEEIVDRVRKLNDELAKD

SEQ ID NO: 24296 - protein, 59 aa, Artificial Sequence
  Synthetic
EDVKRKLKEVVDESRRTVDEIRRELERVVEKSRKNIEEVKKHTREVLKRSEETARELKK

SEQ ID NO: 24297 - protein, 56 aa, Artificial Sequence
  Synthetic
SEVDRVLEEIRKLNEDLNRRVDDATRKIRDLNRKLNEDVKKVTEDIKKLNEDLRKD

SEQ ID NO: 24298 - protein, 59 aa, Artificial Sequence
  Synthetic
EEVKRKLEKLVRESERNVREVKKKLDEVRKESKTNADKVREELKRVVEESERTVRELEK

SEQ ID NO: 24299 - protein, 56 aa, Artificial Sequence
  Synthetic
SEVDEVEKDIERLLEELRERVKRVTDEIRKLNKELNETDTDIVRKIRELLERLERD

SEQ ID NO: 24300 - protein, 59 aa, Artificial Sequence
  Synthetic
EEVKRRLEEVLRKVKRELDRIRDELRRVVEESETNVRDVRRHTEEVVKEVEDEVRRLEK

SEQ ID NO: 24301 - protein, 56 aa, Artificial Sequence
  Synthetic
SEVEELERRIRELLRRVKRIDEEIVRRIRELNKELNRRDERIVETVRELVERVARD

SEQ ID NO: 24302 - protein, 59 aa, Artificial Sequence
  Synthetic
EEVKKRLEDVLRRVREEIERLKKHTDDVLRESEKNAEDVKKHTDDVVREIEERIRELKK

SEQ ID NO: 24303 - protein, 56 aa, Artificial Sequence
  Synthetic
SEVEEVIKEIEKLNEDVNRIDKEIVKRIRDLNREVNERDKEIVKEIKRLVEEVRKD

SEQ ID NO: 24304 - protein, 59 aa, Artificial Sequence
  Synthetic
EEVKDRLRKVLESSSDNVRRVTEHTDKVLEESRKNIEDVKKHTDEVVKEIEKEVRELKK

SEQ ID NO: 24305 - protein, 56 aa, Artificial Sequence
  Synthetic
DEVKEVIRRAEKLNEKINDILRRVEEEIRRTLDEVRRRDEKIVKEIRDLMRELSED

SEQ ID NO: 24306 - protein, 59 aa, Artificial Sequence
  Synthetic
EEVKRELEEVVKESEKNIREVTDRLRKVLEESTKIVEELEEHTKRVVDEIRKRADELRR

SEQ ID NO: 24307 - protein, 60 aa, Artificial Sequence
  Synthetic
SLEEEIDRVLDEIRRIIEEIKKHTTEVLEESKRNIEEVKKHTDEVNEKSRRDIEKIKREV

SEQ ID NO: 24308 - protein, 59 aa, Artificial Sequence
  Synthetic
KEKVRKVIEEIKKIAEDVARRDKEMVDRSREINKKVNEEDKKIVEDSKRIIEDVKRKTD

SEQ ID NO: 24309 - protein, 60 aa, Artificial Sequence
  Synthetic
SLEKEIKDALDRIKKDIEDSARRTKEVNDKSKEIIDRLKKHTDDVNDESRRRIKEIKDEV

SEQ ID NO: 24310 - protein, 59 aa, Artificial Sequence
  Synthetic
KRLVKEVIDRLDEIVEDVKRRDEEIIRTSEKLLRDVARLDEEIAKRSRDLLRDVERKVK

SEQ ID NO: 24311 - protein, 60 aa, Artificial Sequence
  Synthetic
SLEERLKKVLKEVDERIREIKKHTDKVNEESRDKIRKLKEELDRVNRESEEEARKIKSEV

SEQ ID NO: 24312 - protein, 59 aa, Artificial Sequence
  Synthetic
DKDVRDVEEEIRKLLDEVRKLDEEMVERSKKLARTVERLVKEVIRESKEIIRKVKEETD

SEQ ID NO: 24313 - protein, 60 aa, Artificial Sequence
  Synthetic
SLEEEIERVLRKVEKEIRKIKERLDEMLKEIRERIERSKRRTDKVNEDSRRRIEEIKRRV

SEQ ID NO: 24314 - protein, 59 aa, Artificial Sequence
  Synthetic
KEDVKKVKKDIDKLLKEVREEVKEAEDRIRRIAEEVDKEDKRMIETSRRIIRKVDEDVR

SEQ ID NO: 24315 - protein, 60 aa, Artificial Sequence
  Synthetic
RIEDKLRKVLEEVERIIREIRKRLEDANDDSRREIEESKEDTDRVLEEIRRRIEEIKREV

SEQ ID NO: 24316 - protein, 59 aa, Artificial Sequence
  Synthetic
DEDVERVLRKIKELLRRVEEEVERVIRESKKLLDEVRKEDEEIKKTLRDIVREVARKVK

SEQ ID NO: 24317 - protein, 60 aa, Artificial Sequence
  Synthetic
SLEETVEKALKDSKDNIKRLKERVDRVLEESRRTIEELRDRARRVREEVKKRLDELRRRG

SEQ ID NO: 24318 - protein, 59 aa, Artificial Sequence
  Synthetic
KDAVKKLIDDVRKINKELNDTVEKLARDVEEINKEVARRVEKLVRELEKIDEDVTRREK

SEQ ID NO: 24319 - protein, 59 aa, Artificial Sequence
  Synthetic
SLEEKVREVLKRSEDNIRKLEDESRKVLEDSERNLRKLKKEVDDAADRVRRKIKELRER

SEQ ID NO: 24320 - protein, 59 aa, Artificial Sequence
  Synthetic
ARIVDKLIREVEKINRDVNEKVRTSIEDLKRINEELNERVERLIREVERILKEVEDRAR

SEQ ID NO: 24321 - protein, 60 aa, Artificial Sequence
  Synthetic
SLDERVERALEKSEENLRRLKKRSEEVLEEVKEAIKELKRRSREALEDVRRVLDELRKDG

SEQ ID NO: 24322 - protein, 59 aa, Artificial Sequence
  Synthetic
AKVVEELIKRVEEINTRLNEKVKKSIDDVRRIIEEVRRRVEKTIRDVERIKEEVERRRR

SEQ ID NO: 24323 - protein, 60 aa, Artificial Sequence
  Synthetic
RLEDEVRKMEKEVREEVKRLEDESRKVLEESRRNLDKLREESKRVLDTVRERIKDLRRRG

SEQ ID NO: 24324 - protein, 59 aa, Artificial Sequence
  Synthetic
AKVVKELIDRVRKILEDVEREVKKSIEEVKEINRRLNEEVKKTIEEVKEIVKEVTERAK

SEQ ID NO: 24325 - protein, 60 aa, Artificial Sequence
  Synthetic
SLEDEVRDMDRKVDEALKRLRDESKKVHDDNKREIDKLRKESEDVHRENKETLDRLRERG

SEQ ID NO: 24326 - protein, 59 aa, Artificial Sequence
  Synthetic
KDAVRELKRDVERIIKEVDELVKRSIEESRRITEEVARRVKETIDRSRKITKELRDRAD

SEQ ID NO: 24327 - protein, 60 aa, Artificial Sequence
  Synthetic
SEIEELEERLERSTRDVEKKVRDTIRESERSTEEVARRVDESIKRLERVVEEVEERVRRI

SEQ ID NO: 24328 - protein, 59 aa, Artificial Sequence
  Synthetic
EEIRKRVEDVAKKVKEDTDKLRDDSRKVHERNEEESRRLEEKSERVLRRVEEILKEIER

SEQ ID NO: 24329 - protein, 60 aa, Artificial Sequence
  Synthetic
SEVDRLITELRRSTKRVEEEVRRLIEDSKRSTREVAERVKESIRRVEKVVEEVKRRVDRI

SEQ ID NO: 24330 - protein, 59 aa, Artificial Sequence
  Synthetic
EDIRRKIEEVVKEVKEETDRLREEAEKVVRENRKASEKLRRESEEVVERVKKKVDDTET

SEQ ID NO: 24331 - protein, 60 aa, Artificial Sequence
  Synthetic
REVEEIIKELRKSTTDVAETVERLIKRSRESTKEVADRVKRLIDEVRRVVEDVERKVRRI

SEQ ID NO: 24332 - protein, 59 aa, Artificial Sequence
  Synthetic
ERIEKEIEDVVREMEERTKRLEKRAEEVNEENKRRSDELRKRIKKAVDEVEKRLDEIRN

SEQ ID NO: 24333 - protein, 60 aa, Artificial Sequence
  Synthetic
SEVEDLIKKLEESTEEVDRRVKKLIEDSRRSTEDVDRKVKELIKDVRRVIREVEERVARI

SEQ ID NO: 24334 - protein, 59 aa, Artificial Sequence
  Synthetic
DRIRETVERVFRKVERKTRELREEIREVDERNRRDSKRLRDEVERVARELEKKLKEIDE

SEQ ID NO: 24335 - protein, 60 aa, Artificial Sequence
  Synthetic
EEVERLIRELEESTDRVAREVERLIRESRKSTEDVRRKVDKLLREVREAIKEVEERVRRT

SEQ ID NO: 24336 - protein, 59 aa, Artificial Sequence
  Synthetic
EEIKRKIDKVVEEVRRRTEELRERIERVNEENKEASERLERKLREMAKELDKKLKDIRR

SEQ ID NO: 24337 - protein, 60 aa, Artificial Sequence
  Synthetic
KDVDELITRLEESTKRVAEEVKRLIEESRRSTERVAREVRRSIEEVKRVIREVEEKVRRI

SEQ ID NO: 24338 - protein, 59 aa, Artificial Sequence
  Synthetic
KDIERKIREVVEKVERDTRRLEEEAKKVNEENEKASRDLEKESKDAADTLEKKLRDIER

SEQ ID NO: 24339 - protein, 60 aa, Artificial Sequence
  Synthetic
DEVEDLIRRLEESTKDVAKKVDDTIDESRKSTKDVAEAVKRSIDEVRRVVREVEERVRRI

SEQ ID NO: 24340 - protein, 59 aa, Artificial Sequence
  Synthetic
DRIRDEIRKVVERAKERTKELEDKSKEVNDRNRETSERLKKESEDVVREVKKELDRIRK

SEQ ID NO: 24341 - protein, 60 aa, Artificial Sequence
  Synthetic
SEIDKVETEVKKLDKELEELVKRSSEKTEKLDRELEKLLRDVVREVEKLLKEIEDLVRRR

SEQ ID NO: 24342 - protein, 59 aa, Artificial Sequence
  Synthetic
KELAERIKKVARESEETVRRLEERLERDSERSRETLRRLAEAVRRVIEKVKEILERLRT

SEQ ID NO: 24343 - protein, 60 aa, Artificial Sequence
  Synthetic
DKMEEVRRTVEKLLEDLNRLSEEVIRTSEKLLEELRRLSEEVERDTERLLKELEKMKRDG

SEQ ID NO: 24344 - protein, 56 aa, Artificial Sequence
  Synthetic
DEDIKRVLDEVKKILDDNREKNKRALDRVREEVKRLEDRNREVVRKVRKIVEDLRR

SEQ ID NO: 24345 - protein, 60 aa, Artificial Sequence
  Synthetic
RVDERLDTVLKRVEETVRENKKKNDELLERSKENIDRLKKRLDDLLDKVRREAEKLKREV

SEQ ID NO: 24346 - protein, 59 aa, Artificial Sequence
  Synthetic
EEVVKEVEERIKKLLKEVNDTSKDAERRLRETNERLNEIVKEVEKRIRELSEEVRKRVK

SEQ ID NO: 24347 - protein, 60 aa, Artificial Sequence
  Synthetic
SVDERLDEVLERVKEDMDRNRRKNDESLREDEENVRRNKKETDESVKRVEERVRELKKRV

SEQ ID NO: 24348 - protein, 59 aa, Artificial Sequence
  Synthetic
EEVVKTVEEDIKRLLKEVNKVSDEAHKRNKELNERVNRVNKEAHKRNEDLLREAERKVR

SEQ ID NO: 24349 - protein, 60 aa, Artificial Sequence
  Synthetic
DVKERLDKVLEEVKRDIERNKRRNDKLLKESKRIVEENKKKNEKSLEEVKRKADDLRTKV

SEQ ID NO: 24350 - protein, 59 aa, Artificial Sequence
  Synthetic
KEVVEKVEREIERLREEVNRVSKKAEEDVERTNRELNRVSDEAHKTNERLLEKVERDVK

SEQ ID NO: 24351 - protein, 56 aa, Artificial Sequence
  Synthetic
SSEDKARELVRTLEEALRELEREMRKVVEDSKKTLKELEERNRRLEEELEKVLERV

SEQ ID NO: 24352 - protein, 55 aa, Artificial Sequence
  Synthetic
DRVIEELKELLERLRERVERVIKKVKDLNEELRRRNDKVAKDLKRLLKELEDRTR

SEQ ID NO: 24353 - protein, 58 aa, Artificial Sequence
  Synthetic
SIEDEIRKVLTRLRRVLEEIKRSSKEVADELKRVLEEIKRSSEENNKEVEEVLKEIEK

SEQ ID NO: 24354 - protein, 58 aa, Artificial Sequence
  Synthetic
REVREVIERLERMLEELERHNRDVERDLRRVLEEAKRHNEESLRRSKELLKKVRDEIE

SEQ ID NO: 24355 - protein, 59 aa, Artificial Sequence
  Synthetic
SIEDEIRKLKEDIKRVLDKVRRDNERLKERLDKVLEDIRRSSEDNNRKLEEVLKRIRDK

SEQ ID NO: 24356 - protein, 59 aa, Artificial Sequence
  Synthetic
EERVREVIEKLKETLERLKREDKEVADRAEKLLREAEEHNKRSLDESRRVLEELDEEIR

SEQ ID NO: 24357 - protein, 59 aa, Artificial Sequence
  Synthetic
SIEDRVRRVLEELEEVLERIKDSSRRVVEEAEDVLRKLEEENRKLERDLERVLKEIEEE

SEQ ID NO: 24358 - protein, 59 aa, Artificial Sequence
  Synthetic
ERELEEVEKRLREVLRRLEKHNEDVIRDLRRLLEEAADEDRRVIKTLRDVLRELKKRIK

SEQ ID NO: 24359 - protein, 59 aa, Artificial Sequence
  Synthetic
KIEEKIRRLEEDLDRVLDEIRRNSERVTKEAEEVLERLKRENEKLKKRLEEVLEEIRRR

SEQ ID NO: 24360 - protein, 59 aa, Artificial Sequence
  Synthetic
ERRVDKVIEDLKRVLDEARRHNEDVVRKLKEALDKLREDDDRVRRDLEKKLRDLERRIE

SEQ ID NO: 24361 - protein, 59 aa, Artificial Sequence
  Synthetic
SIREKIRELEERLEEVLRRIEENSERVLREAERVLKEIKDNSKRNNEKLERALEEIRKL

SEQ ID NO: 24362 - protein, 59 aa, Artificial Sequence
  Synthetic
EREVDRVIRKLEDVLRKLEEHNRRVVERLKRLLEELKKHNEDSLRKSEEVLRKLEEDAR

SEQ ID NO: 24363 - protein, 59 aa, Artificial Sequence
  Synthetic
SIEERVRELMRDLERVLKEIREHSKRVIEEAKRVLEEIERNSERNNKELEEVLDEIRKR

SEQ ID NO: 24364 - protein, 59 aa, Artificial Sequence
  Synthetic
EKELEEVERRLRKVLEDLRRNNKEVVDRLKEVLERLKEHNRRSLDESRKVLRELKERIR

SEQ ID NO: 24365 - protein, 59 aa, Artificial Sequence
  Synthetic
SIEDRIRELEKRLEKVLREIEEHSKKVVREAEKVLREIEENSRRNNKRLEEVLDEIRKR

SEQ ID NO: 24366 - protein, 59 aa, Artificial Sequence
  Synthetic
EEDVRKVIRDLEDALRRLKEDNEDVVRRLKEVLKELRKHNKRSLDESEKVLRELRERIR

SEQ ID NO: 24367 - protein, 58 aa, Artificial Sequence
  Synthetic
SIEDEVRKLAKDLDDVLREIEENSKRVLEKLDEMLERIREHSERVVERAKRVLDEIRK

SEQ ID NO: 24368 - protein, 59 aa, Artificial Sequence
  Synthetic
ERELRTVIRKLKEVLDRLREHNKRVVEELEEALKELEKDNRKVVEDLERMLEELKREVN

SEQ ID NO: 24369 - protein, 58 aa, Artificial Sequence
  Synthetic
SIEEEIEKVKKRLEDVLREIKKHSEEVKKKAEDVLRKIEKHSRDNNRKAEEVLKDIAR

SEQ ID NO: 24370 - protein, 59 aa, Artificial Sequence
  Synthetic
EEEVRKVIEELEELLERLRRNNEEVVRDLERVLEELKRDNEKSVEDSERLLTELKREIE

SEQ ID NO: 24371 - protein, 61 aa, Artificial Sequence
  Synthetic
SVKEELDDLERKVDEDVRRIRRELDEVLKESRENVKRSKDHLDEVLRRVEEAVKRLIRERG

SEQ ID NO: 24372 - protein, 59 aa, Artificial Sequence
  Synthetic
KEKVDRAKKEIEDLLREVRKRVEDVAREIKRLNEDVNRINDKVTREIEKLLEDVDRKVK

SEQ ID NO: 24373 - protein, 61 aa, Artificial Sequence
  Synthetic
SVEDKLRELEKRVRDVHRKNEEDLDRLLRKSHEMHKRNEDELRKVLEEVRDAVRKLLKEKG

SEQ ID NO: 24374 - protein, 59 aa, Artificial Sequence
  Synthetic
DEEVERVIKRIDDLLKEVHKILREVIRRIEKSLEEVHKRVRDLVREIKELLKEVDRKAK

SEQ ID NO: 24375 - protein, 60 aa, Artificial Sequence
  Synthetic
SLEDKVRELERKSRENIKRNEEELRRAKRESEENIKRNEEELKRNKERSDRMIEKIRRET

SEQ ID NO: 24376 - protein, 59 aa, Artificial Sequence
  Synthetic
KDVVERLREALEDANRRVNERNRELIKRLKEANKKVNEENEDLLRESEEILRRVEEEVR

SEQ ID NO: 24377 - protein, 60 aa, Artificial Sequence
  Synthetic
SIEELVKDAKRRSKENADRNREKLRKVEDDSRRNIEENERRLEENEKRSREVIKELADRT

SEQ ID NO: 24378 - protein, 59 aa, Artificial Sequence
  Synthetic
EDVVEKLIRELEEINREVNKRNDDLIRELREINKKVNEENKRLMKESDDILKEVRERVR

SEQ ID NO: 24379 - protein, 60 aa, Artificial Sequence
  Synthetic
SIEDLVRELKKKVDEVAEDLRRKVREALERSRENIDRLKKHSEENLRRSEEVVDKLRKET

SEQ ID NO: 24380 - protein, 59 aa, Artificial Sequence
  Synthetic
DKVVKKLIKEVDDILREVTKLVEKLIRELEDINRKVNERNRRLAEESRKILDEVEKRVR

SEQ ID NO: 24381 - protein, 60 aa, Artificial Sequence
  Synthetic
SLDEKVEELRREVDEAIKDIKEKVKRANEESERNIRELEERVKRNLEKSKKAIEELARRV

SEQ ID NO: 24382 - protein, 59 aa, Artificial Sequence
  Synthetic
EKVVEKLRKEVKEVLKEVEDRVRKLIREVERINEEVNRRVKELLEESEKILDDVDKRVK

SEQ ID NO: 24383 - protein, 59 aa, Artificial Sequence
  Synthetic
EVEERVKELEKEVEEVLKESEDHVRKSEEDLRRALEESRKHIEDLERKLKKVLEELERK

SEQ ID NO: 24384 - protein, 59 aa, Artificial Sequence
  Synthetic
KDLLKKLEEEIRKIITENRKLNRDLHRENERIIRDVRRENKRLADELEEIIKEVRERLK

SEQ ID NO: 24385 - protein, 59 aa, Artificial Sequence
  Synthetic
SVEEKVEELEKEVRKALEDSKRHVDESEKRARDLARRSRELVRRWEEEVEKIVRELETR

SEQ ID NO: 24386 - protein, 59 aa, Artificial Sequence
  Synthetic
EDLLRKLADEIRRILEDNRDLNRRLNEKNKEVLDRLEELNKTLADELRDIIRKLEKELE

SEQ ID NO: 24387 - protein, 61 aa, Artificial Sequence
  Synthetic
KELEDVVRKIEEDLRRLEESNEKVHRENEEIIRRVDETNKKVMKEIKEMEKKVRDLVRERK

SEQ ID NO: 24388 - protein, 54 aa, Artificial Sequence
  Synthetic
EVERVIERLEKVVRDSAANVERSIRELERVVEESSKHVEDVKRELKKVVDEIRT

SEQ ID NO: 24389 - protein, 60 aa, Artificial Sequence
  Synthetic
SDLDRVREEAERVVETVRRSNKEVKKKLDRELKRLRDSNKDVVDKIKRVLEKLRELIKRR

SEQ ID NO: 24390 - protein, 54 aa, Artificial Sequence
  Synthetic
EIEEVRDKLRKVVEESSKHAEEVKRDLERVVEESTRNVDRVREDLKRVLDEIET

SEQ ID NO: 24391 - protein, 60 aa, Artificial Sequence
  Synthetic
SLRERIEELKEELRRVLEELERRHRETEKKLEEVLKELKRRHEELVRRLRKALKEIKDKL

SEQ ID NO: 24392 - protein, 59 aa, Artificial Sequence
  Synthetic
EEAIKDVERKVKKLLKELRDLSEKVRKESDDLLRRLRRESERVERETRKLEKELRDEVR

SEQ ID NO: 24393 - protein, 60 aa, Artificial Sequence
  Synthetic
SKADEVRKKVDDINKRLRETTDRVAEETKKLIEELKKSAEEVKREVDKINKDLRKLAEDG

SEQ ID NO: 24394 - protein, 56 aa, Artificial Sequence
  Synthetic
EKDVERLTRKSEKVVREIEKKNEELKRELTEVLKDDERRNKELVEDSRRVLEEIRT

SEQ ID NO: 24395 - protein, 60 aa, Artificial Sequence
  Synthetic
DKARDVARKVEELLERLRELSERVSRTSEDLNRKLKKISEDVSRTSKKLLDELRRAKEKG

SEQ ID NO: 24396 - protein, 56 aa, Artificial Sequence
  Synthetic
EEDVRRLKERVKKVMEELERRHERDKEKSRRVVEKLERDHREDLKRVKKVLEEITK

SEQ ID NO: 24397 - protein, 59 aa, Artificial Sequence
  Synthetic
SKADKVEEEVKELLKRAKALSDRVSEESRRLLKELRDSARRVEEEVKRLEEELRKLKED

SEQ ID NO: 24398 - protein, 56 aa, Artificial Sequence
  Synthetic
EEKVRRVLREVREMLKDLEKKHRDDIKRVTEVLKEDEEKNRDLMRKVDKFLEDIRK

SEQ ID NO: 24399 - protein, 59 aa, Artificial Sequence
  Synthetic
SKAEEVEELVKKLLAEVKKSLDDVRRTVEKLLREVRKSLREVEETVKRLLKRLKDLKDD

SEQ ID NO: 24400 - protein, 56 aa, Artificial Sequence
  Synthetic
EEKVEKLERDVRRALERDTRENKKLEDRVETALREDKKRNDDLREDVKRVLEEIRT

SEQ ID NO: 24401 - protein, 61 aa, Artificial Sequence
  Synthetic
DELEELIRRIEKLIRDSRKITDDVRKEIEKTIRESREINKEVHERNRKLLEEITEVVKRDG

SEQ ID NO: 24402 - protein, 56 aa, Artificial Sequence
  Synthetic
EEDLRRVDDRVRRVVEESEERLRRVYEESRKVVEESRKHLKEDLDRVKRTVEEIER

SEQ ID NO: 24403 - protein, 61 aa, Artificial Sequence
  Synthetic
SELERVEEEIKKLIRTSREINKEVAKRIEETIKESRDINKEVVDRIRELIERLREVVKRDG

SEQ ID NO: 24404 - protein, 56 aa, Artificial Sequence
  Synthetic
EKELKRVEDEVRKVVEESKDHLRKVYEKSKKVVEESKEHLDRVLREVEKEIEEIRR

SEQ ID NO: 24405 - protein, 61 aa, Artificial Sequence
  Synthetic
SELERVEEEIKRLIDESERINRKVVKEIEDTIRTSEEINREAHRRNRELIKRVEDVVRTKG

SEQ ID NO: 24406 - protein, 56 aa, Artificial Sequence
  Synthetic
EKELRRVEEEVRKVVRDSERHLDEVYKRSKEAVDRSKKHLDKDVEEIDRVVKEIER

SEQ ID NO: 24407 - protein, 61 aa, Artificial Sequence
  Synthetic
RELEEVKKEIDRLIREVEEVNKDVVRKIKETIRRSREINKRVVDEIRRLIKELDDVVKTKG

SEQ ID NO: 24408 - protein, 56 aa, Artificial Sequence
  Synthetic
ERELRKVLEKVERVVKKSRDHLDRVYEDSERVVRESEKHLDEVLERVREEIERIRK

SEQ ID NO: 24409 - protein, 61 aa, Artificial Sequence
  Synthetic
RELEEAEKTIEKLIKESRDINEKVARDIDKTIREIREEMKRVEEEIRDLIRRIREVVKRDG

SEQ ID NO: 24410 - protein, 56 aa, Artificial Sequence
  Synthetic
ERKLREVTKRVDKVLEESRRHLEEVYRKSKEVVDEIRKRLREVLKRVREDVERIER

SEQ ID NO: 24411 - protein, 61 aa, Artificial Sequence
  Synthetic
SELDEVAKRIKELIKESRRINEEVERRIKKTIDEVRKINKEAAKTVDDLIKTIRDVVRRKG

SEQ ID NO: 24412 - protein, 56 aa, Artificial Sequence
  Synthetic
EKKLRDLEEEVRRVVEESKDHLRKVYERSRKVVEESRKHLDEVLTRVDKVVKDIRT

SEQ ID NO: 24413 - protein, 60 aa, Artificial Sequence
  Synthetic
SELEEAEKKIERLIEEVRKMNKTVHEENERLIEDLRRVVKEAHERNKRLIEELEDVVRKI

SEQ ID NO: 24414 - protein, 59 aa, Artificial Sequence
  Synthetic
KDVEKKLKDVLDKVRKVVEESRRHLEESLDKVRRVAEEIRKRLKESKDRVDEAAKEIRR

SEQ ID NO: 24415 - protein, 60 aa, Artificial Sequence
  Synthetic
DELEEAEKRIKELIDRLEEFNEEVHRRNEKLIRELREVLKRVEEEIRRLIKELRDEVRKI

SEQ ID NO: 24416 - protein, 59 aa, Artificial Sequence
  Synthetic
KRVEERLERVLREVEEVVKRSRKHLEDSLREVEKAVKEIRDRLDEVLRRVEKAVEEIRT

SEQ ID NO: 24417 - protein, 60 aa, Artificial Sequence
  Synthetic
SELEDAERKVKELIDRLREVNRKVHEDNKRLIDELRDVNRKVAEEVRRLIEELKEVARRV

SEQ ID NO: 24418 - protein, 59 aa, Artificial Sequence
  Synthetic
KRVRDRLKEVEDRVRKVVEDSRRHLEKSLREVEEVIRESREHLEEVLRRVKEEADKIRK

SEQ ID NO: 24419 - protein, 60 aa, Artificial Sequence
  Synthetic
SELEKVREDIKRLIEDLRRANDRVRRESERLNRELREVNKRVHDDNRRLIEELRRLVKDI

SEQ ID NO: 24420 - protein, 59 aa, Artificial Sequence
  Synthetic
ERVRDELRKLLRTVEKVVEESKKHLKEVLDRSREVVEESKTHLEKSLTDVEKVVREIRT

SEQ ID NO: 24421 - protein, 60 aa, Artificial Sequence
  Synthetic
STLDEAVKRIDELIKRLREVNEEVARRSKRLNDELKKVNEDVARKIEELIRRLRDVVRKI

SEQ ID NO: 24422 - protein, 59 aa, Artificial Sequence
  Synthetic
KRVEEELERVLRKVEKVVKESRDHLEEVLRRSEDMARRSREHLEELLKRVEKVVREIRT

SEQ ID NO: 24423 - protein, 60 aa, Artificial Sequence
  Synthetic
SELEEAIRRIEKLIRELREVNKRVAEEVKKSNEESKEVNKRVKDDVKELIERLRDIVKKV

SEQ ID NO: 24424 - protein, 59 aa, Artificial Sequence
  Synthetic
KDVEDKLREVLRRVEKVAEESRRHLEKVARESEEVVKRSRKHLEEVEREVKKVIDEIRK

SEQ ID NO: 24425 - protein, 60 aa, Artificial Sequence
  Synthetic
RTLEEVEKEVEKLIEDLRRVNREVAERIKKSNEDSKRVVERVEDEIRRLIEELKDMVRKV

SEQ ID NO: 24426 - protein, 59 aa, Artificial Sequence
  Synthetic
ERVDKRLRDVLRKVKKVAEESRKHLEELAERSKEVVERIRRRLEEVLKRVREEAEKIRK

SEQ ID NO: 24427 - protein, 60 aa, Artificial Sequence
  Synthetic
SELEDAERRIERLIRELRKANEEVARRIEKSNEDSRRVNKKVAEEIERLIKELRDVTKDV

SEQ ID NO: 24428 - protein, 59 aa, Artificial Sequence
  Synthetic
KRVEEELKRVLDEVKRVIEESKERLKKWLRDSERVVEESRRHLEELRKRVEKAVREIRT

SEQ ID NO: 24429 - protein, 59 aa, Artificial Sequence
  Synthetic
RVEDEVRKMREKSEKVDREIREAVRRSLTRIKEVVDEIRDEVRRSEDKVKKEIDRLRKE

SEQ ID NO: 24430 - protein, 62 aa, Artificial Sequence
  Synthetic
EEVDKLLDEVRREADESNTRLRERVKEVNKRNEEVIEELRKRVEEVHRTNEDLIRELRKKTT

SEQ ID NO: 24431 - protein, 59 aa, Artificial Sequence
  Synthetic
REEEELERVKRRSEKVDEEIKKRLREVAEEVKRSNEEVKKRLEEVLRDSKRKLDELREE

SEQ ID NO: 24432 - protein, 56 aa, Artificial Sequence
  Synthetic
VRELIRELEESNKRVKDVLRKLIEEVKKSDDELREIVKRLVEEVERSNKELEDRVR

SEQ ID NO: 24433 - protein, 59 aa, Artificial Sequence
  Synthetic
REEERLKKLKEDSDRVDREIERKAEKVLEESEEVDRDIERKLREVERKSREVLEELKKR

SEQ ID NO: 24434 - protein, 56 aa, Artificial Sequence
  Synthetic
LEELRKEVEKSNTDLEKIIEDLIRRLKKSNEDVRRTVTELVKEVDRSNKKLEDEVR

SEQ ID NO: 24435 - protein, 59 aa, Artificial Sequence
  Synthetic
REEEELEKLRERSERVDDEIRKRLREALERSREVDEELRRRAEESKKESDEVIKDLARR

SEQ ID NO: 24436 - protein, 56 aa, Artificial Sequence
  Synthetic
LDELRREVEKSNEDVRRFLEKLVRDLEESNRRVRERIKRLHEENKKSNDELRKRTK

SEQ ID NO: 24437 - protein, 60 aa, Artificial Sequence
  Synthetic
SELEELKKKSKKLNDDIERVVEEVLKRSEDINERVKKEVKDVIDRNTDVLRRVKRDVERE

SEQ ID NO: 24438 - protein, 56 aa, Artificial Sequence
  Synthetic
EEAVRKVEKENRESVEKLKKAVKEVRDRNRKVIEELKDLVRRSRDKSKKVVDELRK

SEQ ID NO: 24439 - protein, 60 aa, Artificial Sequence
  Synthetic
REVDKARKDVDDILKRVTEAVDRMDRDNERVLREVEETIRKLEEDSRRINKDIEDAVRKE

SEQ ID NO: 24440 - protein, 56 aa, Artificial Sequence
  Synthetic
RKDVEDVRRKVEEVVRRMEKRLRESEKKSRDVVRKLRKVIEDVERDNDRVVKELEK

SEQ ID NO: 24441 - protein, 60 aa, Artificial Sequence
  Synthetic
SELEEMRRRIERLAEEVRTTVEEVVRRSEELNKEVEKAVRKVVDENRRVLEEVKEEVRKE

SEQ ID NO: 24442 - protein, 56 aa, Artificial Sequence
  Synthetic
KEEVKRVEERVERVVEELRRLVEEVRKRNEDSIEKLKDLVRRSKEESERVVKELED

SEQ ID NO: 24443 - protein, 60 aa, Artificial Sequence
  Synthetic
SDLERVRKESEDLNRRIKTEVRRVLEELKELLKRIKEEVEELVRRNEEVLKRVREEVTKR

SEQ ID NO: 24444 - protein, 56 aa, Artificial Sequence
  Synthetic
EEAVRKVKEDNDRSVEELKELVKDVERKLREAIKELEDLIRRSEEKSREVVERLRR

SEQ ID NO: 24445 - protein, 61 aa, Artificial Sequence
  Synthetic
SLEEEVRRVKKELRRVLEKSTKLIEEVTRELETVLRESRDRVRRAKEELKEAVREVRRDVG

SEQ ID NO: 24446 - protein, 59 aa, Artificial Sequence
  Synthetic
EEEVRKVVEDVERVLRELEKHDRDVAEEVRRVLDELRKHDEDVRRKLRKVLEELKEKIK

SEQ ID NO: 24447 - protein, 61 aa, Artificial Sequence
  Synthetic
SIEDRVRRVEKELREVERKSTETVKRVEEELEEVVRRSRELVERVKERLKKMVEEVKRDTG

SEQ ID NO: 24448 - protein, 59 aa, Artificial Sequence
  Synthetic
EKELEDVERDVRRVLKEAEDNDRRVVERVRRVLKEAEKHDRDVVRRVDEVLKRLKEEIR

SEQ ID NO: 24449 - protein, 61 aa, Artificial Sequence
  Synthetic
SIEEAVERVAKRLEEALRRSTEEVKRVKEETRESVERSRREVEKVEKELREVVERVRRERG

SEQ ID NO: 24450 - protein, 59 aa, Artificial Sequence
  Synthetic
DDRLRKVVEELETVLDELRKNDRRVIEEVRRINDELRRRDEEVIKRVRDMLKKLTEEIK

SEQ ID NO: 24451 - protein, 59 aa, Artificial Sequence
  Synthetic
SLEDKLRENKRRSEAVVEEAERRLRKNEEDSRKVVRELEDKLRRLREESKEMADRLRRK

SEQ ID NO: 24452 - protein, 59 aa, Artificial Sequence
  Synthetic
DKVVEKLLKESKEILDRARETVKRILDDSERILRELRRRVEKLIKESRDILRKVDEDER

SEQ ID NO: 24453 - protein, 59 aa, Artificial Sequence
  Synthetic
KAEEILEDIKRAVEEALRKLEESVRRNKERIREAVERLRETVKEAKERVDEVKRELEEK

SEQ ID NO: 24454 - protein, 59 aa, Artificial Sequence
  Synthetic
EEVLRKVREDLERIIRRVEEESKKSHKDSEDVLRRVEERSKKSLEELEDIIKKVKEEAD

SEQ ID NO: 24455 - protein, 60 aa, Artificial Sequence
  Synthetic
DMEKIVRDVEDRVREVEDRLRRIAERNKREIERVVEELKKTVKEIEDKVREVVKRLEEKG

SEQ ID NO: 24456 - protein, 59 aa, Artificial Sequence
  Synthetic
EEVLRKVVTDLERILRRVLEDAKRVHEESKRRLDDVRRRSEDSVRRLEEELKRVEEEVD

SEQ ID NO: 24457 - protein, 59 aa, Artificial Sequence
  Synthetic
DAEKILEDIKREVDEVLKRLRDIIRRNEEEIRRAVEDLKRIADEDREAIKRVIDELRKK

SEQ ID NO: 24458 - protein, 59 aa, Artificial Sequence
  Synthetic
EEALRKVVEELRKILRDVTEVAKKVHRDSEEVLKKVREDVRKVHEDSKRVLDKVDKDAN

SEQ ID NO: 24459 - protein, 56 aa, Artificial Sequence
  Synthetic
SRLEEVLRRHEELNERVERTVKKVHDDSKELIDRIRKDVEKVVRELEKVIDEVEKN

SEQ ID NO: 24460 - protein, 55 aa, Artificial Sequence
  Synthetic
EKVEEIERHARKVERRLEEIVDRNRKSVDKAKKELEKIVRDVRRRVEEVVDRLRK

SEQ ID NO: 24461 - protein, 56 aa, Artificial Sequence
  Synthetic
DEVRRVLEELRRLLDEVRERVRRVVEEHKRLNDRIRREVERAHEENKRVDDDLRRK

SEQ ID NO: 24462 - protein, 55 aa, Artificial Sequence
  Synthetic
KDVKEVKKEVERVKEELRRLVEELRKHAEKVKEELKRIVDRDRETNERTVEELKK

SEQ ID NO: 24463 - protein, 57 aa, Artificial Sequence
  Synthetic
SEAEDVLRKLERLLEEVRERVADAHRRSKELLDRVDKEVKRVNEENRKLDDDIRKKV

SEQ ID NO: 24464 - protein, 55 aa, Artificial Sequence
  Synthetic
DEARKVREKVKKVEEELRRIVEEDRKEVEKVKRKLEKDVREDEKENRKTVRELEQ

SEQ ID NO: 24465 - protein, 60 aa, Artificial Sequence
  Synthetic
TLEELLEEIRRKVEEVLKKLEDLLRRDHEEVKKVEEELEEINKRSEDRVRKAVRRLERDA

SEQ ID NO: 24466 - protein, 59 aa, Artificial Sequence
  Synthetic
EEAIRKVLRKLEEEAKRLEKRIEEVLKESKDRIDELRKRIEESHKDLERIIEELERRIK

SEQ ID NO: 24467 - protein, 60 aa, Artificial Sequence
  Synthetic
RLEELLERIRKRVEEVKRESERLLKEDHDRVEEAKKRSEDINRRSKEEVDRMLRELETKA

SEQ ID NO: 24468 - protein, 59 aa, Artificial Sequence
  Synthetic
EEAIRRVLKKLEEIAKRLLDENRRVLEESKKIIDKLEEDNRRSHRELKRILDELRKRIK

SEQ ID NO: 24469 - protein, 60 aa, Artificial Sequence
  Synthetic
KEAEDLEKKVEDILRRVRELLEELHRRSEKILKDVKDRSRDLLRRVREILKRVEEKKERV

SEQ ID NO: 24470 - protein, 56 aa, Artificial Sequence
  Synthetic
ERLVREVEKKLRTVEEEVRRIVKENKERLDEAREDVKRSNKTIRDELERARERIET

SEQ ID NO: 24471 - protein, 60 aa, Artificial Sequence
  Synthetic
SEAEDLTRRVREILKRVEDLSKKLNDDTKKILDELRELSKRLMEEVKKILRRVEEKKERV

SEQ ID NO: 24472 - protein, 56 aa, Artificial Sequence
  Synthetic
KRLVDTVREELERVRKKVEDSDRRNEEELRKVKEEARRSNERIRELLKTVEDRIRT

SEQ ID NO: 24473 - protein, 60 aa, Artificial Sequence
  Synthetic
DEVRKLVREVEDILRRVREKSERLVRLVEEILRRVLEESRRLLEETREILERVEEKKERV

SEQ ID NO: 24474 - protein, 56 aa, Artificial Sequence
  Synthetic
ERLVREVKELLDRVADEVRKSDEDIRRLLEDAARKVEESNKRNRDLLETVRRRIEK

SEQ ID NO: 24475 - protein, 60 aa, Artificial Sequence
  Synthetic
SEVEKLKKEVKESSKEVIKEVEKLHRESEKSSEDVKREVEKLHRRSKEVADEVRERVRRR

SEQ ID NO: 24476 - protein, 56 aa, Artificial Sequence
  Synthetic
ERVVEEIERDVRESLRRIEEIIRRNEKRVRESLEDLKRILRENKETVRKVVDELRK

SEQ ID NO: 24477 - protein, 60 aa, Artificial Sequence
  Synthetic
SEVDDLTRRVRDVLRRVEEKVRDLHRRSEKVARDVEREVEELHERSKDVARKVEEKVRRI

SEQ ID NO: 24478 - protein, 56 aa, Artificial Sequence
  Synthetic
KDVVDRIRREVEEMLRRLEDILRRNEDTVRRVKEKLKRIVKRDEEEVRKVLDRLRK

SEQ ID NO: 24479 - protein, 60 aa, Artificial Sequence
  Synthetic
SEVEELKKRVEDVAEEVKDRVRKLHEKSERSSREVEKEVRKLHEESRRVAREVTERVRRI

SEQ ID NO: 24480 - protein, 56 aa, Artificial Sequence
  Synthetic
EEVVKEIRDTVEKVLEEARKIIEDNRKRVAESVETLKDIIRRDEKTMRDVVDELRT

SEQ ID NO: 24481 - protein, 60 aa, Artificial Sequence
  Synthetic
DEVEELRREVEESSRRVEKEARRLHKRSEESSREVEERLKRLHDDSRRVAREVEEIVARS

SEQ ID NO: 24482 - protein, 56 aa, Artificial Sequence
  Synthetic
EDKVRDIKRRIDESKRKIEEIIKRDKEEAEKSEEKIKEIIERDRETVERVVRKLRE

SEQ ID NO: 24483 - protein, 60 aa, Artificial Sequence
  Synthetic
EIEEIEEELKDRVRRSEEKLRRIEKELRELVEKSRKELEDLLDKDRRDMKRVADELRRDD

SEQ ID NO: 24484 - protein, 59 aa, Artificial Sequence
  Synthetic
RRVVEELTRKLEESIKKSEDEVKKVKERLEESIRRSKERLEDARRESERVLTEIRERLR

SEQ ID NO: 24485 - protein, 60 aa, Artificial Sequence
  Synthetic
EVERILDELRRRVEEVVKENEKALDTLRKESERTEEENKRLLDEAREKVDRVVKELKRDD

SEQ ID NO: 24486 - protein, 59 aa, Artificial Sequence
  Synthetic
EKVLRDLAKKLEDVIRKSEELTKELAKRLRESSKRSIDLTRELLKRLEEVLKKVRDALR

SEQ ID NO: 24487 - protein, 60 aa, Artificial Sequence
  Synthetic
SVEEIVEEIRRRSKETEDRNRRVVEELEERVRRVLEELKKIVEDARRKVEKVARELKRDD

SEQ ID NO: 24488 - protein, 59 aa, Artificial Sequence
  Synthetic
EKVVEELLRRLKETSDDSLRRTDELRKELERVLKEVRERLKELDRELKRVLDDVREKIR

SEQ ID NO: 24489 - protein, 59 aa, Artificial Sequence
  Synthetic
KLEDILRKIEKELKEVKEKSERIVREIEKRHEDDKRRVEDIVRRIKEEVERVVKEIKEA

SEQ ID NO: 24490 - protein, 59 aa, Artificial Sequence
  Synthetic
DEVMKKVEKEVRDVIKELEDTAREVEKKSEKVLKETNDLAKEVMDKVRKVAEDLRKKLE

SEQ ID NO: 24491 - protein, 59 aa, Artificial Sequence
  Synthetic
ELEEIVRRIEEEVRRADKEVKEILTEIEKEHRRDVERSDRSLEKIKRDVDRALEEVERV

SEQ ID NO: 24492 - protein, 59 aa, Artificial Sequence
  Synthetic
REVMKKVTEEVREVLDRLRELLKEVAKRSEEVIKRTNELNETVMRDVERVLRELREELR

SEQ ID NO: 24493 - protein, 59 aa, Artificial Sequence
  Synthetic
SEVEKLEEDFREMIERSERTLEKLKKENEDASKKSKEKLEKLLREMKEIIDRIRDLIRK

SEQ ID NO: 24494 - protein, 55 aa, Artificial Sequence
  Synthetic
EEVIKKLRELLERLEREHRKVIEELKKSNKKNEEDIRRVLEELRRLVKKLADDAR

SEQ ID NO: 24495 - protein, 59 aa, Artificial Sequence
  Synthetic
REAEELLKEMKRASEKSEKIIEDLRRENEKLSKESEDIIRKLKEDNERMIRTIEELIRA

SEQ ID NO: 24496 - protein, 55 aa, Artificial Sequence
  Synthetic
EEVIKELRELLERNEREIKKVLDELRRSNEKNERDIERALEELKRTNDELAKRAK

SEQ ID NO: 24497 - protein, 59 aa, Artificial Sequence
  Synthetic
DEVEKLRREIEEIIKEWEKRTRDLKREMKKISDDSRRRIEELLRDFKRIIDELRKAIED

SEQ ID NO: 24498 - protein, 55 aa, Artificial Sequence
  Synthetic
KEVIERLRELVKRVTDKVRKVNEELRKLLEDNADEIRRAIERLRELLRRLEEEAR

SEQ ID NO: 24499 - protein, 59 aa, Artificial Sequence
  Synthetic
SEVEKLVREAEKIIEDIRRVIEELLRRARKINKEWDDVSRKLKEDAKRIIDTVLKLIRE

SEQ ID NO: 24500 - protein, 55 aa, Artificial Sequence
  Synthetic
KDVIERLRDLVRRVKEDIERVLDEWRKSSEEAEERSRRVIEELRRLLEELKERVR

SEQ ID NO: 24501 - protein, 59 aa, Artificial Sequence
  Synthetic
SELEELKKTMDEVNKETKKENDRLLDEARKVNEESRRRLEKLRKELDDVVREVEDARRR

SEQ ID NO: 24502 - protein, 59 aa, Artificial Sequence
  Synthetic
SDKVERVLRELRKSSRKVHEDSKKVVEDLERSSRTVEKELRDALKELEDKVREVEKKLK

SEQ ID NO: 24503 - protein, 60 aa, Artificial Sequence
  Synthetic
DELEKLLEEARKVNEETKEANERLLREMEKVNKESEDANRKLLEELKEVVDRVDDLARRN

SEQ ID NO: 24504 - protein, 59 aa, Artificial Sequence
  Synthetic
SEDVKRVVDELRESSREVHRRSREVVERLRRSSEEVHKKSRDVLRELTRLVREVKERLR

SEQ ID NO: 24505 - protein, 60 aa, Artificial Sequence
  Synthetic
DELETLLRELERVNKETERELERLKREAEEVNKATRKDLDELRKEIDKVVKEVEEARRRN

SEQ ID NO: 24506 - protein, 59 aa, Artificial Sequence
  Synthetic
SERVKKVVDELRDSSRRVKEKLEDVVRRLRDLSRRTKEEVEKVEEDLRRKVREVEERLR

SEQ ID NO: 24507 - protein, 60 aa, Artificial Sequence
  Synthetic
DELETLLDEAKKVNEETRRANRELRERVREVNKRTEEELKKLRDRLEKVVDDVDKLRKRN

SEQ ID NO: 24508 - protein, 59 aa, Artificial Sequence
  Synthetic
SRRVREVEERLKKLSEDTHRDSRRLVEEMRRLSKETEKKVEDVVRDLRRLVKEVEERVK

SEQ ID NO: 24509 - protein, 60 aa, Artificial Sequence
  Synthetic
DELEKLRRELEEANRRTKKANEEILREAERVDERSEEELRKILETLKKVVKDVDDMARRN

SEQ ID NO: 24510 - protein, 59 aa, Artificial Sequence
  Synthetic
DRRVRTVVEELKKLSRETHEDSKRVVEELERLSRESERKLREVVKEMRKLVKDVEDKVK

SEQ ID NO: 24511 - protein, 60 aa, Artificial Sequence
  Synthetic
DELEELLRRVEEVDKESKRRLDEIKRRMKEVNDRTREALRDLLRRLAEVVKRVLDLIRRG

SEQ ID NO: 24512 - protein, 59 aa, Artificial Sequence
  Synthetic
SERVKKVVDDARDSSRKTVERLETVVRDLKRSSDDVEREVRELLKELERLVKKVEDDAK

SEQ ID NO: 24513 - protein, 60 aa, Artificial Sequence
  Synthetic
RELEELLRKVRKLVEEIERELKKLLEEDRRLSEESREELRKLLEDARRMIREIEELLKRR

SEQ ID NO: 24514 - protein, 58 aa, Artificial Sequence
  Synthetic
EDAKRVLKEIRRLAEELKKSVKRVIEEVEDSNRRNEEEVRRVLEEIRRLLEDLDRKVK

SEQ ID NO: 24515 - protein, 60 aa, Artificial Sequence
  Synthetic
SELEELLKDAKRVIDTSRRLITELEKRDEEIIRRIKDLLRRVTEEAKRMLDEIREELKRR

SEQ ID NO: 24516 - protein, 58 aa, Artificial Sequence
  Synthetic
EKAKRVLEEIRKLLEDSKKESEDVARKLKKSNDELRRDVERVLREIEKRLEDLKREVE

SEQ ID NO: 24517 - protein, 60 aa, Artificial Sequence
  Synthetic
SELEKLLREVEKIIRDSDDLLRRLEKRNRDLIRTSEKLLKEVKDDVDRVIRELERLLEEE

SEQ ID NO: 24518 - protein, 58 aa, Artificial Sequence
  Synthetic
EKAEDVLRRIEKLLDDSRRRSEKVAKELEESNERSKRKTEKVLKEIKEALDRVREKVK

SEQ ID NO: 24519 - protein, 60 aa, Artificial Sequence
  Synthetic
SEIEKVARDVEELLKKVEKKNRDMVERVRRLLEKVKRENEELVRRVEESNERLKERVDRS

SEQ ID NO: 24520 - protein, 56 aa, Artificial Sequence
  Synthetic
VEELEKTVRKLARDAEKISEDVERRVRELARRLRKISEEVLRRNKELVRRVDEEIR

SEQ ID NO: 24521 - protein, 60 aa, Artificial Sequence
  Synthetic
SEVEEAVERVKKLLEKVRKDNEEFRERVRKSNEEAEERNRRVVEEVRRSNEELKEKVERS

SEQ ID NO: 24522 - protein, 56 aa, Artificial Sequence
  Synthetic
VEDLKRRVKELADEARRISEKVLRDNKRLLTELDKISERVLRENEKLVREVEETIR

SEQ ID NO: 24523 - protein, 60 aa, Artificial Sequence
  Synthetic
SEIEKVAREIEELLRKVAEDNRRMVERVRRLLEEVKTRNKKMVDEVKESNERLKDKVRRR

SEQ ID NO: 24524 - protein, 56 aa, Artificial Sequence
  Synthetic
VEELKRRAERLIEELRKISEEVERRVKRLVEELEEITRRIKEENDKLVREVEKELK

SEQ ID NO: 24525 - protein, 60 aa, Artificial Sequence
  Synthetic
SEVEKVVEELKDLVRKSSEKNRKVAEEVKKSNDDLRRKVEEAVREVRESNERLKREVDES

SEQ ID NO: 24526 - protein, 56 aa, Artificial Sequence
  Synthetic
VEELKDRVRKLIEESERISREILKTNRKLLKELEELLKRLLKRNRELVREVKEEIK

SEQ ID NO: 24527 - protein, 61 aa, Artificial Sequence
  Synthetic
SDIERVVKEVKDLLEEVRKDNERVMDEVRKLLEELKRKLRKVVEEVRRSNEELKKEVDRRN

SEQ ID NO: 24528 - protein, 56 aa, Artificial Sequence
  Synthetic
VETLRKEVEELADDLRRISEEVRDRVRKLVTKAEEILRRVLETNKKLLKEVKETLK

SEQ ID NO: 24529 - protein, 60 aa, Artificial Sequence
  Synthetic
SEIEKVAEEIKKLLRKVEEDNKTVVEEVRRSNEKLKRDNDKVVRDVERSNRELKEELDRS

SEQ ID NO: 24530 - protein, 56 aa, Artificial Sequence
  Synthetic
VEELKKRVEELARRAKEISDKVRDDNEKLLRELREITKRVKEENDRLLKEAKDAIK

SEQ ID NO: 24531 - protein, 60 aa, Artificial Sequence
  Synthetic
KEIEDVAKRVEELLRESSREVEEVLREVEELVRRSTRRNEEAVRRVRKSNKELEDEVRRS

SEQ ID NO: 24532 - protein, 56 aa, Artificial Sequence
  Synthetic
VKTLLDEAKRLVDRSRELLERLLRDVRRLIKESDKITRELERKNEKLLKEVKEEID

SEQ ID NO: 24533 - protein, 60 aa, Artificial Sequence
  Synthetic
SEIEDAEREVRRLLRESSERVKTVIEEVRELLRRVKRENDEAVKEVEKSNRDLEDKVRRG

SEQ ID NO: 24534 - protein, 56 aa, Artificial Sequence
  Synthetic
VEELKERVKRLVADSERLLKELRDRVKELADEARRTTEEVLRRNRELVRRIEEDIR

SEQ ID NO: 24535 - protein, 60 aa, Artificial Sequence
  Synthetic
SELDEVLKTVRKIIEENEKIVKEVLDTSRRSVEEVRKHTKEVLDRVRELAKELEDATRKT

SEQ ID NO: 24536 - protein, 58 aa, Artificial Sequence
  Synthetic
EEVDKVAEEIEKLVRESNRKVREVVKEIEKLNRDMRKESEDAVKEIEELLRTLEEKVR

SEQ ID NO: 24537 - protein, 60 aa, Artificial Sequence
  Synthetic
SELDEVLKTVEKIIRDNEEIVKEVLRRSERSIKELKKHTDDILRKARKLAEELKRVVERT

SEQ ID NO: 24538 - protein, 58 aa, Artificial Sequence
  Synthetic
KRVKDVAERIRELVEESNRKVREVVERIKDLNRKVNKTSEDAAREIEKLLEELREEVR

SEQ ID NO: 24539 - protein, 60 aa, Artificial Sequence
  Synthetic
DELEEVLKRVREIIKRNEDHSDRVREKSRESVKELEEHTERVLRDVERLARELEEMIDKT

SEQ ID NO: 24540 - protein, 58 aa, Artificial Sequence
  Synthetic
KKVDDVAREIEKLLKESNDKSRELVKEIKDLNKRLNEKSEEAVKRIEDLLRRIEERVR

SEQ ID NO: 24541 - protein, 60 aa, Artificial Sequence
  Synthetic
KELEDVLERVKEIIKRNEEILDKVRREVEESVRRAEEILKEVLERVRDLVRKLDDIKDKM

SEQ ID NO: 24542 - protein, 58 aa, Artificial Sequence
  Synthetic
EEVKRVADEIKRLADESNEKVRRVVRRIDELNKEVDRKLKEVMKEIKKELEDAERRVR

SEQ ID NO: 24543 - protein, 60 aa, Artificial Sequence
  Synthetic
DELEEVLRRVRKIIEENKEIVRRVLEDVKRSVEELERHTERVLREAKRLADELEDARRKI

SEQ ID NO: 24544 - protein, 58 aa, Artificial Sequence
  Synthetic
EEVKRVAKELRELLERSNREVRRVVEEIKKLNDEVRKKSEEMRRRIEKLLEELERKVK

SEQ ID NO: 24545 - protein, 60 aa, Artificial Sequence
  Synthetic
SDLEEVLRRAEKLIEDLERIVRKVLEDSDRSIDEVRRHTEKVLRDVRKLAEELKDIARKT

SEQ ID NO: 24546 - protein, 58 aa, Artificial Sequence
  Synthetic
EEVKRVIDEIRDRLRKAEERVRKVIEDIKRKNKKLREDSEKAEREIDELLRKVEEDVK

SEQ ID NO: 24547 - protein, 60 aa, Artificial Sequence
  Synthetic
SELEEVLERVKDLLKKLKEHSDRVLEESKESIDRVRKHTEEVLRTARELIERLDEMRKRT

SEQ ID NO: 24548 - protein, 58 aa, Artificial Sequence
  Synthetic
EEVKDVAREIRRRLDELRKDSERVAEEIRRLNKKLRDESRKAIKEIEELLRRVTKKVE

SEQ ID NO: 24549 - protein, 60 aa, Artificial Sequence
  Synthetic
DELEEVLERVRKLIDELRKHSKEVLDTVRDLLRRHKKKNEDSLRTVRKLLTDLEDAVRKI

SEQ ID NO: 24550 - protein, 58 aa, Artificial Sequence
  Synthetic
ERVKRVAEEIKKLLEDLRKESEDVVKELEDLLDELRRRTEKVVREIEELLKRLEERVK

SEQ ID NO: 24551 - protein, 59 aa, Artificial Sequence
  Synthetic
SEVERVERRLEKVIEEDKERTKRVEREVEDSNKKDDDLTREVLDRVRKSARDVERKLEE

SEQ ID NO: 24552 - protein, 55 aa, Artificial Sequence
  Synthetic
REALRRLRELVKKLEDDNRRVLRRLDKLLDDVRKKNEEAMRESRDLSRKVAEKIR

SEQ ID NO: 24553 - protein, 59 aa, Artificial Sequence
  Synthetic
DEVREVEKRVRESNERDKKLLREVLEEVRRSDKDDDDRTRKVLKRVEKAAEEVKRLLEK

SEQ ID NO: 24554 - protein, 55 aa, Artificial Sequence
  Synthetic
EDVIRKLRKSLKEVKDDSRRVLKELDDSLRETHKRNRDAMRRLDELLEEVARRIK

SEQ ID NO: 24555 - protein, 59 aa, Artificial Sequence
  Synthetic
DEIEEIKRRIEKSSEDDKRVLRELEARAREIRKELDERVKRLEKRIKELLERLRKLKED

SEQ ID NO: 24556 - protein, 58 aa, Artificial Sequence
  Synthetic
RDVRRVLEEWKRLSRKNEEENKAVIEKLRALLEDLKRRLKEVLKRIAELVKKIADELK

SEQ ID NO: 24557 - protein, 60 aa, Artificial Sequence
  Synthetic
RESEELRREIEKISRENKELVRRLEEAIKRLSDEDKELVERLRRETKKIADKVEDLLEKL

SEQ ID NO: 24558 - protein, 55 aa, Artificial Sequence
  Synthetic
EEVLREIKKIIDDNRRENREALERIKDIVRRNEEENEKALRESRKRTRELEERLR

SEQ ID NO: 24559 - protein, 60 aa, Artificial Sequence
  Synthetic
SRVETIRKRVEDLIRRSEDLIRRLEEDVKRVVDEIRKLLEKLKEDDERVIRRIEDLLRKE

SEQ ID NO: 24560 - protein, 55 aa, Artificial Sequence
  Synthetic
ERVVEEIKERLDRSRRRTEEALERIRKRLEEVKKEVEDVLREVEKTNREIKKEVR

SEQ ID NO: 24561 - protein, 60 aa, Artificial Sequence
  Synthetic
SRVDELRRRVEELLKRSKELLEEIKRRDEEVLRRIKELLDRLRERVDDALRKISELLTRE

SEQ ID NO: 24562 - protein, 55 aa, Artificial Sequence
  Synthetic
EEVVREIKKKLTESREDTKRLLEELKKTNDDIRKDVERLRREVEKKVRDIERRVK

SEQ ID NO: 24563 - protein, 59 aa, Artificial Sequence
  Synthetic
SEVEKLLEEVRELTKRHKEELRRLNKEMEKATRDHLRKSKKLNDEAREMVRRVEELVKN

SEQ ID NO: 24564 - protein, 58 aa, Artificial Sequence
  Synthetic
ERAARVKEELDKLHKDLEREVRESKRTLKELHDRLRKAVEESKEHLKRLLDELRKKVK

SEQ ID NO: 24565 - protein, 59 aa, Artificial Sequence
  Synthetic
DEVERLLEEVRRVVKEIEDRSRKLNEDARRVTEDHLRKSEELNRRVEDAVRRIRELTKN

SEQ ID NO: 24566 - protein, 58 aa, Artificial Sequence
  Synthetic
EEARKIRETLKRLLDELRKKLEESKKHLDELHDRLRRELEKSKRHLEELLKRLEDELR

SEQ ID NO: 24567 - protein, 59 aa, Artificial Sequence
  Synthetic
SELERLLEKARRDTERHLRESERLNRELKKATDDHLRKSRELNKRLEEVVRRVEEESRN

SEQ ID NO: 24568 - protein, 58 aa, Artificial Sequence
  Synthetic
REAKKVEDDLRDLHRRLKEAVDRSKKHLEDLHKELEDELKRSIDHLRKLLEEVKRKLD

SEQ ID NO: 24569 - protein, 59 aa, Artificial Sequence
  Synthetic
SRVEDLLRRVREVVKRVKKDLTKLLEEVKRMTDEHLKRSKELNDRAEEIVRRLKELLDR

SEQ ID NO: 24570 - protein, 58 aa, Artificial Sequence
  Synthetic
ERAREVVERLDELLKEVADRVEEVKDRLRKLHRKLEESVKKSLEHIKRLIDDLRRKAK

SEQ ID NO: 24571 - protein, 59 aa, Artificial Sequence
  Synthetic
RELEKLLEDARRVVTTLTRASEKLNEDVKKVTEEHKDRIRRLLDTVRRIVEEVDKRTKG

SEQ ID NO: 24572 - protein, 58 aa, Artificial Sequence
  Synthetic
EEARKVKEELDRLLEDLRKKLEDSKRHLDELHRELEETVREVSERLKELLDAVRRRAK

SEQ ID NO: 24573 - protein, 59 aa, Artificial Sequence
  Synthetic
SELEKLLKDVADMVREITERSKKLNDELKKLTEDHDRKIKRLNERLEEIIREVEKLVDD

SEQ ID NO: 24574 - protein, 58 aa, Artificial Sequence
  Synthetic
DEARKVAERLKELLDRLRRKLEESKRHADELHERLRKSVEDSKKHIKDLVDELKRRVD

SEQ ID NO: 24575 - protein, 60 aa, Artificial Sequence
  Synthetic
SRVEELLKRLEDATRRHLEVSKRLNDDLRRATKDHLDKLRELNERVKKVVDDVVEKIKSN

SEQ ID NO: 24576 - protein, 58 aa, Artificial Sequence
  Synthetic
EEAREVRERLDRLHEELEKEVRRSEKTLKELHDRLRKEVERSKRHLDELLKDLEDKVR

SEQ ID NO: 24577 - protein, 59 aa, Artificial Sequence
  Synthetic
SRVEKLVREVEKVVEEVERTIRKLLEDVKEMTDRHLKMIEDLNRELEEIVRRVTELIKN

SEQ ID NO: 24578 - protein, 58 aa, Artificial Sequence
  Synthetic
DEARKVKKRITELVERVEREVDRVKKELEKLHERLKREVEKSSEHIKRLLDELRKRAE

SEQ ID NO: 24579 - protein, 59 aa, Artificial Sequence
  Synthetic
RELEEILRRVKEVTKDHLDKIDELNKRLDKATKEHLERLRDLNRRLKEVVERIEEEIRN

SEQ ID NO: 24580 - protein, 58 aa, Artificial Sequence
  Synthetic
READKVRKDIRRLHEELAREVKKSEDHLRKLHEELRDEVRRSEEHLDALLEDLKRKVD

SEQ ID NO: 24581 - protein, 59 aa, Artificial Sequence
  Synthetic
SELEKLLRDMEEATKRHDEMLKKLNDEIRKVVERILKELEDLNRRLEEIVRRLKEESKN

SEQ ID NO: 24582 - protein, 58 aa, Artificial Sequence
  Synthetic
EEADDVRRRLERLHRELRKSVETSKKHLKELLDRLAKSIEDSKKHARELLKRLEEDIK

SEQ ID NO: 24583 - protein, 59 aa, Artificial Sequence
  Synthetic
SEVEELLDRVRKVVEDLMRESKRLNDELKKIVDDILRRLRELNKEIKDVVDEIKKLLDN

SEQ ID NO: 24584 - protein, 58 aa, Artificial Sequence
  Synthetic
EEADKARKDLKRLLDRLRREVERSKEEMDKLLEDLERAVRESEKHLEKLLRDLERRAR

SEQ ID NO: 24585 - protein, 59 aa, Artificial Sequence
  Synthetic
SRLEELLKRLDDIVKRVLTKIRELNERLKKIVEELLRRSEELNREVRRVAEEIRRLEEG

SEQ ID NO: 24586 - protein, 58 aa, Artificial Sequence
  Synthetic
DKARDVRRTIRKLVRDVAEAVRRSTEHIDKLLEDLEREVRRSERDIERILRELEEEAR

SEQ ID NO: 24587 - protein, 59 aa, Artificial Sequence
  Synthetic
SDVEKLLEDVRRMTEEHKELIKELNERVERIVRKVVEDSKKLNDELREIVKRVEDESRN

SEQ ID NO: 24588 - protein, 58 aa, Artificial Sequence
  Synthetic
EEAARVREDLDRLHEELERFVRESKKHLDEMLKELRRRLERSKEEIDRLVKEAEEKLR

SEQ ID NO: 24589 - protein, 60 aa, Artificial Sequence
  Synthetic
REVEEVLKEVKKIVDRNREELKRVLDEIRELVKRIEDDLRRVNEESEKLVRTLLELMRRG

SEQ ID NO: 24590 - protein, 55 aa, Artificial Sequence
  Synthetic
EEVRERIERLIEKSERDVREVKKKVEELARRLREEVEKLKKHVKRLLEELKKAAD

SEQ ID NO: 24591 - protein, 60 aa, Artificial Sequence
  Synthetic
SEAEDALRKIKKLVDEVVERIKKVDDDSRKLVEEVERTIEKLDKESEDLVKKVKDMKRRG

SEQ ID NO: 24592 - protein, 55 aa, Artificial Sequence
  Synthetic
EEVKKEVKRLLEELKRRLDESNKRNKRLIDELRKKLEDSRRRNEELLRDLKETAT

SEQ ID NO: 24593 - protein, 60 aa, Artificial Sequence
  Synthetic
DEAEEVERRSRELVERAKTEIEKLDRESKRLVDTVARKIEEVDKRSEELVRTVEELRRRG

SEQ ID NO: 24594 - protein, 55 aa, Artificial Sequence
  Synthetic
EEVEKENRELNRRLKEALDESNKRNRTLLEDLRRKLRESEERNRRLLRKLEEDAR

SEQ ID NO: 24595 - protein, 60 aa, Artificial Sequence
  Synthetic
SEAEEALKKVEELVRRVEEEIKRVDERSKDLVRRVERKLEELVERSKELVKRLLDMRRRG

SEQ ID NO: 24596 - protein, 55 aa, Artificial Sequence
  Synthetic
EDVERRVRELIERLKRKLEESNRRNKKLIDELRKRLEEVKRENEKLNEDLERETK

SEQ ID NO: 24597 - protein, 60 aa, Artificial Sequence
  Synthetic
DELERVLKRVKELIDKSRREDEELDERSKELVKKVLDELKDALRKIEKLVRDLKEMTDRG

SEQ ID NO: 24598 - protein, 55 aa, Artificial Sequence
  Synthetic
EEVRKDAERLIRENEEDNRRSNERNKKILKELKDALDRVKEEVRKLIRRLEEEAR

SEQ ID NO: 24599 - protein, 60 aa, Artificial Sequence
  Synthetic
SEAETVLEEVKKLVERSREEDKEVDDESRELVERVEEKLRRVLKKSKEDVDRVMRLIEEG

SEQ ID NO: 24600 - protein, 55 aa, Artificial Sequence
  Synthetic
EEVEDTIRRLIEENKKRNEESNRRNRELIKKLERKLEEVKRRNEDLNRKLEETAR

SEQ ID NO: 24601 - protein, 57 aa, Artificial Sequence
  Synthetic
STLEEAEEEVRRLIKRTEDETRRVADEVKKLLDKHRRATEDVEKKVRELLDRLKKDE

SEQ ID NO: 24602 - protein, 59 aa, Artificial Sequence
  Synthetic
DREIEKIVRRAKETNEENREIIERILKEIKELIDDANRKLKEILDRIRELVETVKRKAK

SEQ ID NO: 24603 - protein, 57 aa, Artificial Sequence
  Synthetic
STLEEVERRIRELLDRHRRATEEVEKEVDRLNKETRDELDRVRKEIEKLLKDLDRKE

SEQ ID NO: 24604 - protein, 59 aa, Artificial Sequence
  Synthetic
DEELRRILKRVEKLVKDLNDKLRKILDDARRSNEEIKRRLEEILKEVKRLVDTVTERAR

SEQ ID NO: 24605 - protein, 58 aa, Artificial Sequence
  Synthetic
SRIERAEEELKRSLKELREDLERVVRTIRKILREHEEKSKDVKRRIEELLREVKKRMV

SEQ ID NO: 24606 - protein, 56 aa, Artificial Sequence
  Synthetic
VDKVLRDVEDLNRTTLKLLEDLLRTVEEVVRRADKLLEDLLREIKRLVDEVMERDR

SEQ ID NO: 24607 - protein, 58 aa, Artificial Sequence
  Synthetic
SEIEEIEKEIRKSVEEVKKTLDKVVTEIRKSTREHEKKSEEVRKRSKELNKDLRDRLV

SEQ ID NO: 24608 - protein, 56 aa, Artificial Sequence
  Synthetic
VKTVLDDVRRVNEETKKRIRDLLEESKRSDEEADRRAEELLERNERLVRKVAEEAR

SEQ ID NO: 24609 - protein, 58 aa, Artificial Sequence
  Synthetic
SRIEEVIRRAREILEDHRRKSTEVRERLKKLLKEHEDKSRRVKEESEKINRDVKRELV

SEQ ID NO: 24610 - protein, 56 aa, Artificial Sequence
  Synthetic
VDKVLKEIEDLVRKADELLRELLKRVEDLVRRADEVLEELLRRNRKLAEDVMRKDK

SEQ ID NO: 24611 - protein, 58 aa, Artificial Sequence
  Synthetic
REIEEVEKEIKKLLDEHRKKSDDVVRKLEKILRDHERRTEDVKRESEKINREVEKRKV

SEQ ID NO: 24612 - protein, 56 aa, Artificial Sequence
  Synthetic
VDEVLERVRELLERADRKLEELLERVRKLVEDANRVIEEVLERNKRLADEAMKKDK

SEQ ID NO: 24613 - protein, 58 aa, Artificial Sequence
  Synthetic
SRIEEIVKRIRDILKEHEDKSRRVVEDIKRSTEELKRALREVVERIKTILDDVRRRLV

SEQ ID NO: 24614 - protein, 56 aa, Artificial Sequence
  Synthetic
VDKVLEDVRRVAKEADDRLEELLERSKKLNKETLDELERLLREVEELVKEVAERDR

SEQ ID NO: 24615 - protein, 58 aa, Artificial Sequence
  Synthetic
SRIEEVSERVREILRRHEEKSREVVERIKKSTKELRDEVRKVRATSKEINDDVRRRLV

SEQ ID NO: 24616 - protein, 56 aa, Artificial Sequence
  Synthetic
VDRVLERVEKMVRDADKRIDEVRKESERLNEETRRRIERLLRENKKLADEVAERAR

SEQ ID NO: 24617 - protein, 58 aa, Artificial Sequence
  Synthetic
SRIERVEERMRELLDRHRETSKRVVEEIRKSTEEHKEKSERVVRESERLNREVERELV

SEQ ID NO: 24618 - protein, 56 aa, Artificial Sequence
  Synthetic
VDRVLEEVERLVTEVNREIKELLERSKRSDKEADRRLEEVVKTNRELAERVARRAT

SEQ ID NO: 24619 - protein, 58 aa, Artificial Sequence
  Synthetic
SEIEEVVRRLEELVKRVAEELKRVVDRIEDLLREHKDKSRRVEERSKEINEDVARRLV

SEQ ID NO: 24620 - protein, 56 aa, Artificial Sequence
  Synthetic
VKEVLERVKKLVDDLIRRLKKLLEDLKKLVDDADEEIKRVLEENEELARRAAERDT

SEQ ID NO: 24621 - protein, 58 aa, Artificial Sequence
  Synthetic
SEIEDVVRRARELLERLRKRVREVVEDIRRSTEEHKEKSERVVKTSEELNKRLEDELV

SEQ ID NO: 24622 - protein, 56 aa, Artificial Sequence
  Synthetic
VDKVLEDVRRLVKEAVDRIDKILRDSRESDRRADEEIKKVLDRNRELVKKVADEDT

SEQ ID NO: 24623 - protein, 58 aa, Artificial Sequence
  Synthetic
DEIERVEEEIRRLLEEHKKRSDEVVRRLEKLLKDHKEVTRKVVEESERINRDVERRLV

SEQ ID NO: 24624 - protein, 56 aa, Artificial Sequence
  Synthetic
VKEVLERIRKLVKDVNKRLEEILEEVERLVRRANRRIEELLERNRRLVEEVARRDE

SEQ ID NO: 24625 - protein, 58 aa, Artificial Sequence
  Synthetic
SEIEKVEEEIRRILEEHKRISDEVKRRVRKSTEEHEKRTEDVERRSREINEEVEARLV

SEQ ID NO: 24626 - protein, 56 aa, Artificial Sequence
  Synthetic
VEEVLRRIRKLAEEVNKELKRLLDESKESDDRLNKRLTEILRENEELARDVARRVK

SEQ ID NO: 24627 - protein, 58 aa, Artificial Sequence
  Synthetic
SKEERIEEALRDLVRRHKEVSRRVVETIKDLAKKLEEKLRRVETDSKRINDEVRDKLV

SEQ ID NO: 24628 - protein, 56 aa, Artificial Sequence
  Synthetic
VERVLEEIKKLVEEVNRELRELLKRIEELLKRAEEMLERLLRENRRLVEEVARRDK

SEQ ID NO: 24629 - protein, 60 aa, Artificial Sequence
  Synthetic
SESEELDKEIDDIVREDEELNKELRKRNDDAVRRVEKVIEDLLRRNEDAAEKVKKLLEEL

SEQ ID NO: 24630 - protein, 55 aa, Artificial Sequence
  Synthetic
RELLRKLREILEDLRRKNERTEEESEEILRRLTKLAEEVLRRSRKILEDLREALR

SEQ ID NO: 24631 - protein, 60 aa, Artificial Sequence
  Synthetic
SEKDELRKRMRDISKENKELLEKLEREIRELSKENEKLNEKLRRELEELRKTIKDLLDRL

SEQ ID NO: 24632 - protein, 55 aa, Artificial Sequence
  Synthetic
RELLKEAKELLEENRKRNEEILRRAEKVLRDNAEKDKRTLEKVEEILDRLRRELT

SEQ ID NO: 24633 - protein, 60 aa, Artificial Sequence
  Synthetic
KEAEDLEREMREISDRNRKLNKKLRRDIKEISDDNRRLLEELRRRLKKMEEDVRRLLEEL

SEQ ID NO: 24634 - protein, 55 aa, Artificial Sequence
  Synthetic
RELLTEARKLLERNREEDKKSLDDARKALKENKEENDKIKEEIDKILRELEEELR

SEQ ID NO: 24635 - protein, 60 aa, Artificial Sequence
  Synthetic
EESERLAKRVDDLSRENEELNKRLRDEMEKISRENKELLKDLRRKADKIVKDVERLLEEL

SEQ ID NO: 24636 - protein, 55 aa, Artificial Sequence
  Synthetic
RELTRRIEKLLKDNTDRDKKSEDDLRELLKENKKRNDEILEEIRRILEELRKKLT

SEQ ID NO: 24637 - protein, 60 aa, Artificial Sequence
  Synthetic
SLDKEIERKVEEIERRLKESNDRLREKVDEIRRRSERLNTELNERVDRIAERIRRMKRDG

SEQ ID NO: 24638 - protein, 55 aa, Artificial Sequence
  Synthetic
ERLEEKIDRIIRELERRNDKSREELEKIIRELRERTKESEKRLEDIIRELEERTR

SEQ ID NO: 24639 - protein, 60 aa, Artificial Sequence
  Synthetic
DADKRLRTDVRRIVEDLKRSNEELRRRSEEIAKRSDKLNKELNKKSKEIEERVKRMRDEG

SEQ ID NO: 24640 - protein, 55 aa, Artificial Sequence
  Synthetic
KDLEKELRDIIRELRERNRESEEEDERIIRELEKRTKDSEKRDDEILRELEREIR

SEQ ID NO: 24641 - protein, 60 aa, Artificial Sequence
  Synthetic
SLVEKIAREVRKIKEDSKRLNDELNEKVRKAVEDLERSNRELEKRVREIEERVRRAETEG

SEQ ID NO: 24642 - protein, 55 aa, Artificial Sequence
  Synthetic
KELEDDIERIIKELEELTRRSEEKLRETIERLEERNKETAERLERIIKELEERSK

SEQ ID NO: 24643 - protein, 60 aa, Artificial Sequence
  Synthetic
KEAEELEERVKRIEEESRRLNRELNEKVKDIAKKLEDSNDKLRKDSEEIAERVKRARTEG

SEQ ID NO: 24644 - protein, 55 aa, Artificial Sequence
  Synthetic
DEVVKKLEDIIREIEKTTRESEKRLEDIIRKLKKKNDDTEREDREIVKRLREETK

SEQ ID NO: 24645 - protein, 60 aa, Artificial Sequence
  Synthetic
SLLEKLERDVERLSEEDEKLNEDVRRVDREIVERDKKLNREVNERVKRLAEEVKDIRRRV

SEQ ID NO: 24646 - protein, 55 aa, Artificial Sequence
  Synthetic
ERAEERLRRIIKRNKEENERTAKESRDSIEELKERNERSKRRLEKILEDLERETR

SEQ ID NO: 24647 - protein, 60 aa, Artificial Sequence
  Synthetic
REAEELEKRVRKIEREDDKLNEELNRRAKDVSREDKELNDRVREVVRRLVEEVDRIRRDV

SEQ ID NO: 24648 - protein, 55 aa, Artificial Sequence
  Synthetic
EELEKKLEDIIRELKKRNDESAERIRRLIKTNEDENRRTAEEIKKILDDIRRKVK

SEQ ID NO: 24649 - protein, 59 aa, Artificial Sequence
  Synthetic
SELEEIRKKIDDLRRRVEEINERITREDKRLVDELKEINKRITDRVRKIARDVEELLRK

SEQ ID NO: 24650 - protein, 60 aa, Artificial Sequence
  Synthetic
DEERLRTVDEEVKKILDELREKLDRNRRRSEETNRRLDELLKENARRVEEIIRRLREEVK

SEQ ID NO: 24651 - protein, 59 aa, Artificial Sequence
  Synthetic
SELEEIKKRVEEIARTLEKLNRDITKLDEDLAREVEDINRRITETVEEIAKRVERLREK

SEQ ID NO: 24652 - protein, 60 aa, Artificial Sequence
  Synthetic
DKERLDKLRTEVKKIMDDLRRILEKNAKDSKRSLDRLRKILEDNKEKVKRIADRLREAVR

SEQ ID NO: 24653 - protein, 59 aa, Artificial Sequence
  Synthetic
KDEKRIKDVLKKLEDDNKKLNDEIKKLNEEIARKNEELNKRIEDMIRKAEREVDELKRN

SEQ ID NO: 24654 - protein, 55 aa, Artificial Sequence
  Synthetic
KEVDDEARRILEKLRRENERTKEESKEINEELEKRNRESVERIKEILRRLEEKLR

SEQ ID NO: 24655 - protein, 59 aa, Artificial Sequence
  Synthetic
SEVERLLREVEKVLRRVVKRSRDLNEELKKRSKEHKETSERLNREMKRVLREVEKKIDE

SEQ ID NO: 24656 - protein, 55 aa, Artificial Sequence
  Synthetic
REVKKRLDELLKRLEREVRESEKRMDRSHEDVRREAERSKKELEELLKKLEDKVR

SEQ ID NO: 24657 - protein, 60 aa, Artificial Sequence
  Synthetic
SEVEKILRDVEDATRRHKRTSEELNRRLEEVVRRVKEESKELNERLREVVKRVKEEIRKT

SEQ ID NO: 24658 - protein, 55 aa, Artificial Sequence
  Synthetic
REVKKRIDELHDDLRRVMEASKERIDRILEDLRRVVERSKEELRKLLEDLKRTVD

SEQ ID NO: 24659 - protein, 59 aa, Artificial Sequence
  Synthetic
SEVEELLKRVEEATERHKREIERLEDEIRKVLEDVDKRSKELNDHNRDVIEKIRERIER

SEQ ID NO: 24660 - protein, 55 aa, Artificial Sequence
  Synthetic
REVKTELDKLHEDLKRTAEEVKKRLDDLLKELEKKVEESKTEIDRSLEELEKTAR

SEQ ID NO: 24661 - protein, 57 aa, Artificial Sequence
  Synthetic
DEERRVKEELEKLLEDLRRTIKKVEEDSDRINKDLERVIRRSEREADKILEDLERAG

SEQ ID NO: 24662 - protein, 59 aa, Artificial Sequence
  Synthetic
EEKLRELLERAKKLVEDIKRRLKELLDRHRDLVRRIKERSKELNKRLKDLIDEIKERAR

SEQ ID NO: 24663 - protein, 56 aa, Artificial Sequence
  Synthetic
SSKDDLRRKIEKLLRDLERVIRESEKRSEEINRDLERTLKRIKEEADKILDKVRRG

SEQ ID NO: 24664 - protein, 59 aa, Artificial Sequence
  Synthetic
DRLLEKLLRELEKLIRRIEEESRKLNEEHEKLLKRIKDELKKLLDDLRRLAREIEERRR

SEQ ID NO: 24665 - protein, 57 aa, Artificial Sequence
  Synthetic
KSTEDAKREIDKLLEELEETIRRAEDRSRRLNEDLARTLKRIEEELKRINEEVEKRG

SEQ ID NO: 24666 - protein, 59 aa, Artificial Sequence
  Synthetic
DELLKKLLDELRELIDRIRRDLERLLREHEELIERIKRTLEELLRRHRELVKRIEETAR

SEQ ID NO: 24667 - protein, 57 aa, Artificial Sequence
  Synthetic
SEEDRLEEEIKRILDDVARVVKRIKEELKRINDELKKVIDESRDHARRVNDDVRRRG

SEQ ID NO: 24668 - protein, 59 aa, Artificial Sequence
  Synthetic
EELLKELLKRLEELARRIKKKLEELLREHEKLLEEIEKALRRSNEEHRKLVEKIKRDAT

SEQ ID NO: 24669 - protein, 57 aa, Artificial Sequence
  Synthetic
DEEERVKEAVERLLRDLERAIKESEDHLRRLNEDLDRVIRESKEHLKKVNDDVRRAG

SEQ ID NO: 24670 - protein, 59 aa, Artificial Sequence
  Synthetic
EELLKKLLEELKRLIERIKRDLKRTNDEHEKLIREIKKRLEDSNRDHERLVKDIKETAR

SEQ ID NO: 24671 - protein, 57 aa, Artificial Sequence
  Synthetic
SKEDRLREELKKLLKRLREEIERLKRALEESNKDLKRTIDRSEKHLRDVNEDVKRAG

SEQ ID NO: 24672 - protein, 59 aa, Artificial Sequence
  Synthetic
EEELDKLLKEARDLIREIEKRLEELLKRVEKLTEDAKRDLERSNREHKELADRIKETAR

SEQ ID NO: 24673 - protein, 56 aa, Artificial Sequence
  Synthetic
SEAERIEEEARRLLEELRRAIERVKEEADRLLEELRDAIRKSKEHLKRLNEDVERA

SEQ ID NO: 24674 - protein, 59 aa, Artificial Sequence
  Synthetic
EEALKRLLEKLKRLIEEIKRELKRLLDDLKRLIDEIAEALKRSNDRHEELVRRIKEKAR

SEQ ID NO: 24675 - protein, 57 aa, Artificial Sequence
  Synthetic
DSKEEIRRKIDELLKRLEETIRRSEEHFRRSLDDARKELKRSRDHVRKVNKELRDRG

SEQ ID NO: 24676 - protein, 59 aa, Artificial Sequence
  Synthetic
DEELERLLRDLERLIREIEKTLEDTNRSNEELVRRLKRRLEESNKRHEDLADEIRRRTD

SEQ ID NO: 24677 - protein, 57 aa, Artificial Sequence
  Synthetic
SEEDRIREEMEEILRRVERTVEEIKKELKKINDDVDRTARESEKHVREVLERVEREG

SEQ ID NO: 24678 - protein, 59 aa, Artificial Sequence
  Synthetic
EELLEKLLEDLKRVVEKIRRDAEDLLERHKDLVRRIKEELRRSNRKLEDLVKKISERAT

SEQ ID NO: 24679 - protein, 56 aa, Artificial Sequence
  Synthetic
DEDREVRRTLEELLDDLRRVIEESERHLEKLNEDVREAIRRSEEHVRRVLDRVRRG

SEQ ID NO: 24680 - protein, 59 aa, Artificial Sequence
  Synthetic
EDLLRKLLEEAKRVLDEIRKTLKKTNEDHERLVERIKRELEKSNKDLERLAKEIIDRDK

SEQ ID NO: 24681 - protein, 57 aa, Artificial Sequence
  Synthetic
SSKEDITKKIEELLRELEEELKKSEKHLRELNEEAKRTAEESRRHLEESLRKVEKDG

SEQ ID NO: 24682 - protein, 59 aa, Artificial Sequence
  Synthetic
DEELKKLLKELEDLVKEIKERLRKTNEEHRKLVEEIKERLKRSNESNERLVRRIEEEAR

SEQ ID NO: 24683 - protein, 57 aa, Artificial Sequence
  Synthetic
SELERAEEEIEKLNRDLKRTLDEIRDRIRKINDDLRKTLRKSDEDSKRLLKELRDEV

SEQ ID NO: 24684 - protein, 58 aa, Artificial Sequence
  Synthetic
EKLKDMLDKHRKLIDDLKRRLERRLREHKRLLDEIEKRLRDSLKRIEEIVREILERAR

SEQ ID NO: 24685 - protein, 57 aa, Artificial Sequence
  Synthetic
DELERIRRELERINTTLDELLKRSKEETDRILKKVEDSIREVEKKVKELLEELKRRV

SEQ ID NO: 24686 - protein, 58 aa, Artificial Sequence
  Synthetic
ELLKKILDEHRDLLRRIEEELRRSLEDIKRVAKEVEERIKKVLDELRRLIEELLRRAK

SEQ ID NO: 24687 - protein, 60 aa, Artificial Sequence
  Synthetic
SVLEEAEKELRKIVEDNRRTLREVKERNKKLNKENRDTIKKIEDDVRRIIRELKEDLKRS

SEQ ID NO: 24688 - protein, 59 aa, Artificial Sequence
  Synthetic
EEDLRRLEEEIRRRSEENKKRIRDLLRRSEELSRRDKKKLKEILERIKRLADEVREKIR

SEQ ID NO: 24689 - protein, 60 aa, Artificial Sequence
  Synthetic
SDLEDILRKIEDLSRKNEEELKRVLEENKKLSDDDKRRLEKILREVEKKIRKIKKDIKDE

SEQ ID NO: 24690 - protein, 58 aa, Artificial Sequence
  Synthetic
EEVRKLEEDVRRIIERNKKLTEDLARELKKLNDDNERTLRKVEEDIRRIIADLRRTLK

SEQ ID NO: 24691 - protein, 60 aa, Artificial Sequence
  Synthetic
SELDEILERLRRLSEENKRRIEEALRRNKKLSEDDERLSREIRRRVRELVEEAKEVLRRE

SEQ ID NO: 24692 - protein, 58 aa, Artificial Sequence
  Synthetic
EEVKRVAEELDKLVKENRRVTEKVARELKKLNDKNREVNERLERELDKIIKDLRRTDK

SEQ ID NO: 24693 - protein, 60 aa, Artificial Sequence
  Synthetic
SEIEKILEDVKKLADDLRRTLKRALEENKELSDRDKEELRRILEEIKKLAEEIDKLIKEE

SEQ ID NO: 24694 - protein, 58 aa, Artificial Sequence
  Synthetic
ERVREVARRIEKIIEDLRRDLERVRRELKKLNDDNRRVLEEVKRTVEEIIKRLRESAK

SEQ ID NO: 24695 - protein, 60 aa, Artificial Sequence
  Synthetic
DEVDELLKEAEEVIREVTREHKRLLDEARKISEENKKRSEESNREVRELVRRIKEEIKKG

SEQ ID NO: 24696 - protein, 59 aa, Artificial Sequence
  Synthetic
SEKAKRVEEELKKLLDKLSRITEEVERRLEELLKDNERVSRESDEELKRILEDVERDTR

SEQ ID NO: 24697 - protein, 60 aa, Artificial Sequence
  Synthetic
SEVEELLDRLRKLIEDVVREHKRLLDEVRRISRENEELIRRLLEKVEEVIRRIKERIKSG

SEQ ID NO: 24698 - protein, 59 aa, Artificial Sequence
  Synthetic
EKTAREAEEELRRLLERLSEVTRKVEKAIEDILRRNRETSERVAREIRRLLKELEDTAR

SEQ ID NO: 24699 - protein, 60 aa, Artificial Sequence
  Synthetic
SSVEELLERLRRISEENKRRIEKLLREVEKVLRELKDRHRKLLKRVEEIIRKVKEEIKSG

SEQ ID NO: 24700 - protein, 59 aa, Artificial Sequence
  Synthetic
RETAERARETLKRLLDENRDRSKKVKEEIRRILEDLTRTTERVKREIKKLLKELEDTAR

SEQ ID NO: 24701 - protein, 55 aa, Artificial Sequence
  Synthetic
DLLRKLLEEAKKILKEIKDAHEKLLRELEESNKELEKAHRKLLEDAKRMLDDLKR

SEQ ID NO: 24702 - protein, 59 aa, Artificial Sequence
  Synthetic
EDRVRDLRRALEELIKESDEVSRRLKEEIDRSLESSKKVSRDLEEELKKLIKDLEDTRR

SEQ ID NO: 24703 - protein, 55 aa, Artificial Sequence
  Synthetic
SELEKLLRDDRELLKELKKAHKKLLDELKESNDRVRKRHEELLRRIREIAKRLRD

SEQ ID NO: 24704 - protein, 59 aa, Artificial Sequence
  Synthetic
KDKVRRVERESKKTHDESREVSEKLRRDAEDSLRSSEKLSEDLERELRKLIKEVRDEAK

SEQ ID NO: 24705 - protein, 55 aa, Artificial Sequence
  Synthetic
KDIERLLEELKRILEDLKRKHKRLLERLEDSNRRIRRTLEELLKRLEKLVKDLSD

SEQ ID NO: 24706 - protein, 59 aa, Artificial Sequence
  Synthetic
KDKVDDAKRRLEELLKESREVSKKLRDDIERSIRSLREEVKKLDEDAKRLLDKVREEIR

SEQ ID NO: 24707 - protein, 55 aa, Artificial Sequence
  Synthetic
SVLEDLIRRDREMLKRAKEEHDRLRKEIERSNREIDEEVKRLLAEIKKIVEEVSK

SEQ ID NO: 24708 - protein, 59 aa, Artificial Sequence
  Synthetic
KKAVDEVRKESDDTHKESEAVSRDLKRELERSIKSLEKRIREAEEELKRILKELEDEKR

SEQ ID NO: 24709 - protein, 55 aa, Artificial Sequence
  Synthetic
EELERLLEEDKELVRRVERELERLLRELKRSNDEIKKTLEDLLRRIEEILKEIRR

SEQ ID NO: 24710 - protein, 59 aa, Artificial Sequence
  Synthetic
KEKVKRAEDRSRETHRRLEEVVKKLKEDAERSIKSLEELVDKLRKELRRLLEEVREEVR

SEQ ID NO: 24711 - protein, 55 aa, Artificial Sequence
  Synthetic
RELEELIKEDEDLLRRLAETLKKLLEDVRRSNEELRKFHEDLLRDLERLLEELRN

SEQ ID NO: 24712 - protein, 59 aa, Artificial Sequence
  Synthetic
KEKVRRVEERSRRTHKELEDLAREVDKELKKSIKSSRDVTRKVKEDADRLLKKVADDTK

SEQ ID NO: 24713 - protein, 55 aa, Artificial Sequence
  Synthetic
SILETLADRDRDMVRRVKEALKKLLERDKRALERLKRVHKELLDRLRKILEDLKR

SEQ ID NO: 24714 - protein, 59 aa, Artificial Sequence
  Synthetic
EEKVKRVEEESRRTHKELKDVADRVETESDKSHEESKKVTDEVRKELERLLRELEETVR

SEQ ID NO: 24715 - protein, 55 aa, Artificial Sequence
  Synthetic
SEAEKLLRELEDILKKLKDALKRLIEEDERLLKRLKREHEKLLKRLEEVLRELKK

SEQ ID NO: 24716 - protein, 59 aa, Artificial Sequence
  Synthetic
REKVKRVKDEADRLLKELEDVVREVKKRSDESHKRSRDVTREMKKELKRLLEELEKTVR

SEQ ID NO: 24717 - protein, 55 aa, Artificial Sequence
  Synthetic
SELERLLREDEEMVERVERVLKELEEEVRKALKRAKEMHRRLLERLKTILDELER

SEQ ID NO: 24718 - protein, 59 aa, Artificial Sequence
  Synthetic
KEKVKELERRSRKTHKELADKADTLRKRLEEVIKESEDVTEELERRLKKLIDDLRRSVT

SEQ ID NO: 24719 - protein, 55 aa, Artificial Sequence
  Synthetic
SELEKLLRELEELLKELKRVLEELIERDKRLLDRLKEVHERLLRRLEKLLKELKD

SEQ ID NO: 24720 - protein, 59 aa, Artificial Sequence
  Synthetic
EDKVREAKRELERLIEELRRAVRRVEDESRRSHEESKKVTDDLDKRARELLEELRETIR

SEQ ID NO: 24721 - protein, 60 aa, Artificial Sequence
  Synthetic
REVEELEKDVRRTLDELRKRHRDNNERIKKILRELEDLHRRNNERTKTLLARIRELRERG

SEQ ID NO: 24722 - protein, 55 aa, Artificial Sequence
  Synthetic
RELERKLKELVKDVEKVIEDDDRSADKLLTKVKRDADEDRKSNEKLVREVREELR

SEQ ID NO: 24723 - protein, 60 aa, Artificial Sequence
  Synthetic
SEAEEVLKRVEEVVERLKKLHDDNNKKLRDAVRRLKRLHTEHNKETKEIKKEIEDLIRKG

SEQ ID NO: 24724 - protein, 55 aa, Artificial Sequence
  Synthetic
REVEKRLKEVVKRIDEVAEEDERSIREILRELRKVIEDDERSNRKVAKEIRESAK

SEQ ID NO: 24725 - protein, 60 aa, Artificial Sequence
  Synthetic
DKVREVLERLKKLVEDLKRLHKRNNEEVRRVIEEIKDRSRRNNKRTEDILRDIEREIRRG

SEQ ID NO: 24726 - protein, 55 aa, Artificial Sequence
  Synthetic
ERIKEELKKLVEDVRRTAEDDRRTIEDLVRKVEEVLERDRKSNEEAARDVDRKLK

SEQ ID NO: 24727 - protein, 56 aa, Artificial Sequence
  Synthetic
RSVEEVKKELDDSDRRDREVVKEARRRLEESKDRLRKIIERAKEELDKSDERIKKN

SEQ ID NO: 24728 - protein, 59 aa, Artificial Sequence
  Synthetic
DEELKKLLKHNREVLEDSRRKIEELLRTNEKALEDVKRAIEELLKHNEEVLKEVDDRTR

SEQ ID NO: 24729 - protein, 56 aa, Artificial Sequence
  Synthetic
KEVEDAEKRLRDLLKEDRELIERLRRALEESLKEDRKVIKELREELDKSDRKVEED

SEQ ID NO: 24730 - protein, 59 aa, Artificial Sequence
  Synthetic
REDIKRLLEELEEVLRRSEKKLRELLDTNRKILEESKERLRRLLEHNKRVLRRVVEETR

SEQ ID NO: 24731 - protein, 56 aa, Artificial Sequence
  Synthetic
SDEERVEKELKKSDDEDKKLIDELTRRLRESLKRLEEEVRRAREELDKSDEEVRKA

SEQ ID NO: 24732 - protein, 59 aa, Artificial Sequence
  Synthetic
REDIERLLDHNRKVLEKSADDLRKLLKTNEEILRRVAKAIRDLLEHNRRVVEEVKERAR

SEQ ID NO: 24733 - protein, 56 aa, Artificial Sequence
  Synthetic
SEVEEAKRRLDESDKDDRRVIDKLRKELEKSREEAKRLIDRLREELKDSNREAEEA

SEQ ID NO: 24734 - protein, 59 aa, Artificial Sequence
  Synthetic
REDLRRLLEHNKEVLERSKKRLEELSETNKKFLEEVKDALRELLKTNREVLREVKERTK

SEQ ID NO: 24735 - protein, 56 aa, Artificial Sequence
  Synthetic
SSVERAKRELDKSLKEDRDTIRDLKRRLEESRKRDREVIEELKKILKKLLDEVKDS

SEQ ID NO: 24736 - protein, 59 aa, Artificial Sequence
  Synthetic
DDKIKKLLDHNRKVLEDSKEELRRLLETNKRILEESKKRLDRLAEEIEKVARTVKEEAR

SEQ ID NO: 24737 - protein, 56 aa, Artificial Sequence
  Synthetic
DEVERAEEELRKSDEEDRRVVKRATETLKKSKDELEREIKRLEDELERSNREVEER

SEQ ID NO: 24738 - protein, 59 aa, Artificial Sequence
  Synthetic
REEIKKLLDHNRRVLEESERRIRELLRTNREVLERVKKELDELLEHNRRVLEEVEKRVR

SEQ ID NO: 24739 - protein, 56 aa, Artificial Sequence
  Synthetic
SSVEKAKKRLDESDKTDRDVIKRLREELKKSEDTDRELVKKVKEEIEKVEEELRRR

SEQ ID NO: 24740 - protein, 59 aa, Artificial Sequence
  Synthetic
DDKIRRLLEHNEEVMKRSKERLDDLVRTNRKILEESKRKIEKLLKELREVVEEVDRRAR

SEQ ID NO: 24741 - protein, 56 aa, Artificial Sequence
  Synthetic
DKAERVREEIEKLERELRRVLKESREHTKKLEEDLERVLRRSREATKKLKEDLERN

SEQ ID NO: 24742 - protein, 58 aa, Artificial Sequence
  Synthetic
ELIKRMLEELKRLLEELEKRIRDSNAELEKLLRDLIRKLERSLREIKRVLEELKEEAR

SEQ ID NO: 24743 - protein, 60 aa, Artificial Sequence
  Synthetic
SEVETLMREIKKLIDDIKRKNEDSNREIREVSRKTEEDLRDLLRKAREVAEKLKDELRRR

SEQ ID NO: 24744 - protein, 59 aa, Artificial Sequence
  Synthetic
EEKVKRLEDSLERLKRDLRKIIKENEDELRKINRRNEELIKKAEEDLRRLSEDLKRAEK

SEQ ID NO: 24745 - protein, 57 aa, Artificial Sequence
  Synthetic
SELEEVLRRIEKLVRKAHKENEDVLREIERLVRTAHRLNKKVDDDSAKIAEDLKREK

SEQ ID NO: 24746 - protein, 58 aa, Artificial Sequence
  Synthetic
ERVRRLKEILERLKEEVRRSLEELRKEVERLKKEVEDSLRELKKSLEEWVKDLEEATR

SEQ ID NO: 24747 - protein, 57 aa, Artificial Sequence
  Synthetic
SDLEAVLDEIKKLAEEAHKRNEEVDKESAKLVKEAHKVNEDVDKESAEIVKRIDEEK

SEQ ID NO: 24748 - protein, 58 aa, Artificial Sequence
  Synthetic
ERVKRLKDELRRLLKEVKDSLEELDRMLEEWKERVRRSLEELRKRAKEWEDKLRESLR

SEQ ID NO: 24749 - protein, 57 aa, Artificial Sequence
  Synthetic
SELEDVLKKIRKLVRDAHEENKRVLEEIRKTVDEIRKELEDVDTKSAEIAERAKERK

SEQ ID NO: 24750 - protein, 58 aa, Artificial Sequence
  Synthetic
ERVERLRRELEKLVREVEESLKRLKEELDKIKEELRRILEELEEKLRRWSRELKETAR

SEQ ID NO: 24751 - protein, 58 aa, Artificial Sequence
  Synthetic
SELEKVVEDLRRIVEEIERRLREVIKEIRELVRRAHERNKDVDRKSAEIVKDIEEKKK

SEQ ID NO: 24752 - protein, 58 aa, Artificial Sequence
  Synthetic
ERVERLKRALDELERRLKELVRELEDSLKKLADEVKRSLEELDKSLKDWKKKLDDELK

SEQ ID NO: 24753 - protein, 57 aa, Artificial Sequence
  Synthetic
SEIERVLEEIKERVERADRKNEKVDRESAEKVKELHRRNEEVDRESAETVKRAERDK

SEQ ID NO: 24754 - protein, 58 aa, Artificial Sequence
  Synthetic
DKVREIRERVERLVKAVDESLERLERSLEEWARRLDKSLEDLKRSLKRWKEELDRKAQ

SEQ ID NO: 24755 - protein, 57 aa, Artificial Sequence
  Synthetic
SELETLIKEATDLAEEVKEDLRRVDEESAKLVEDADDENKRVDEESAKIVEDLKREK

SEQ ID NO: 24756 - protein, 58 aa, Artificial Sequence
  Synthetic
ERIRDLKEKVRRLMEDVKRLLEELERSLERWKEKVRDSLEKLKKSLEEWAKELKDTSK

SEQ ID NO: 24757 - protein, 57 aa, Artificial Sequence
  Synthetic
KDLETVLEEIKRIVDDLDRRNKEVDKESAKLVKEADEKNKRVDEESAKIVKRLEREK

SEQ ID NO: 24758 - protein, 58 aa, Artificial Sequence
  Synthetic
DRVRRLREEVTKLLDEVRRSLDRLRESLKEWKERVDDSLRRLRDSLRKWKRKLEEATR

SEQ ID NO: 24759 - protein, 57 aa, Artificial Sequence
  Synthetic
SELDDLLRRIRELVRRAEEDLKRVNEESARLVEEMDKDNKRVDEESAKIAEDLKREK

SEQ ID NO: 24760 - protein, 58 aa, Artificial Sequence
  Synthetic
KKIEELKREVKKIADELERILKELEDSLREWSERVRKSLEELKDSLRRWAEELKRDLK

SEQ ID NO: 24761 - protein, 57 aa, Artificial Sequence
  Synthetic
KDLERVVKEIERLVREAEKKIREVNDRSAKLARDLDRRNREVLKEIKKIAEDLEREK

SEQ ID NO: 24762 - protein, 58 aa, Artificial Sequence
  Synthetic
ERVERLKRELERLKRELEETLKRLDEELEKWEERVRESLKRLEDRVREILKRLEDDAR

SEQ ID NO: 24763 - protein, 57 aa, Artificial Sequence
  Synthetic
DELETVMKRIRELAKELNKKNKDVLDEIEDLVRKADKRNKEVLKRIEEILREARKRK

SEQ ID NO: 24764 - protein, 58 aa, Artificial Sequence
  Synthetic
ERVKRLKDELRRLIEEVRRNLKRLKEEVDKIRERVRRSLKKLKEDVKRLSDEVKETLK

SEQ ID NO: 24765 - protein, 60 aa, Artificial Sequence
  Synthetic
KEIEDLLRELRELVKEIDDLIKDATREIERLVKEVHDKNEKVTRRLEKLMRELREVARRG

SEQ ID NO: 24766 - protein, 58 aa, Artificial Sequence
  Synthetic
ERIETLERALRELVRELEEKVDEHRKRTDKVARDLKKSVDDHRRRTEELVRELRKTEE

SEQ ID NO: 24767 - protein, 60 aa, Artificial Sequence
  Synthetic
SELEDVLRRAKKLVEDVHRDNKRVTEELEKLARELHKKNEDVLRELKKLADDLREMLKRG

SEQ ID NO: 24768 - protein, 58 aa, Artificial Sequence
  Synthetic
EKVKRLEEEIRRLARELRESVRRHKERTEELVERLKESLKKLEEDIRRLEKELEDDRR

SEQ ID NO: 24769 - protein, 60 aa, Artificial Sequence
  Synthetic
SDLDDVLRRIRELAKRVHDENKRVTEELERLVEELEKKARELLRRIEELVRTLKEMRERG

SEQ ID NO: 24770 - protein, 58 aa, Artificial Sequence
  Synthetic
ERVERLRRELEKLVKELEESVRRHKKRTRELEERLKDVLRELEDAVRRLVEELEKTDE

SEQ ID NO: 24771 - protein, 60 aa, Artificial Sequence
  Synthetic
EEIERLLEEIKRLVETVHESNRRVLKELRDLAEELKRRNTKSNRDMERLVEELEEMRRRG

SEQ ID NO: 24772 - protein, 58 aa, Artificial Sequence
  Synthetic
EKVKTARDEVRRLVEELKESVERLARELKKLVDELRKVDEDNKRRLEELERRLRESTR

SEQ ID NO: 24773 - protein, 60 aa, Artificial Sequence
  Synthetic
SELEDVLRKLEKLAREVDKINKDLIKRVEELARELKKKNEKSNKEARDLVKKLKEMKDRG

SEQ ID NO: 24774 - protein, 58 aa, Artificial Sequence
  Synthetic
ERVRRLKKEVEELERRLRRSVDDLRRKIKELEDRLREIDERNKREIEKLVKELRDTDR

SEQ ID NO: 24775 - protein, 60 aa, Artificial Sequence
  Synthetic
DELETVAKLLEDLSRTNEDRLREVKETLKRLADTVDKINKEVLRRLRELAKRLKELKERG

SEQ ID NO: 24776 - protein, 58 aa, Artificial Sequence
  Synthetic
EDVRRLEEELRKLEERNRRLVRELEEVLKKLKDELKKSVDRLKEELDRLVKELDEIKK

SEQ ID NO: 24777 - protein, 60 aa, Artificial Sequence
  Synthetic
SEIEDALRKMEKLAEDVNRKNEEVIREVRRLSEENKKKLDDVLETLKKLVRELAEMTKRG

SEQ ID NO: 24778 - protein, 58 aa, Artificial Sequence
  Synthetic
ERIRTLEKAVRDLVRELEESVDRLRREADRLVEENERVVERLKRELKRLVEELERRAK

SEQ ID NO: 24779 - protein, 60 aa, Artificial Sequence
  Synthetic
DELREVLERVKRLVDTVNKINDDLTKRNEDLSRKNVDKIRRLTEEIERLVEEVDRARREG

SEQ ID NO: 24780 - protein, 58 aa, Artificial Sequence
  Synthetic
EDVRRLEEEVRKLVEELRRSVEDHKRRNKESVDRNRRAVEEHERRNREVVERLERKAK

SEQ ID NO: 24781 - protein, 60 aa, Artificial Sequence
  Synthetic
SDIEEALKTMEELSRRNEETLRRVLKRLKELADEVNRKNERVLEEAKELADRLRELRERG

SEQ ID NO: 24782 - protein, 58 aa, Artificial Sequence
  Synthetic
ERIKTLEEDLRRLVEENKKVVEELKRRLKKLVDELRESLKELEKAVRKLVKELRDDEK

SEQ ID NO: 24783 - protein, 57 aa, Artificial Sequence
  Synthetic
SSKETVAKRVEDVKRELEEVLKELARESKRLSDRDKKLNEEAAEEIERLKDELRKKV

SEQ ID NO: 24784 - protein, 59 aa, Artificial Sequence
  Synthetic
DEVLERIVKRVRDLVEEIKRRLEKLAEDNRRLSKRNEDVIRTLLEEARKLVEKVKEEVR

SEQ ID NO: 24785 - protein, 57 aa, Artificial Sequence
  Synthetic
RSKEEVAKEIKRLKEENKRLLDELAKRSEELERRDRRLNEEHHREIRRLTDELRKKV

SEQ ID NO: 24786 - protein, 59 aa, Artificial Sequence
  Synthetic
DRVLKEIVDEARRLSERNEEVLRRLLKENEDLSKRNEDFIRKTMKELRDLAEEVKERAK

SEQ ID NO: 24787 - protein, 57 aa, Artificial Sequence
  Synthetic
KSKEDVKREIERLKKENREVLDTARKRIEDLIREDERVNREAAEEIKRLVEELERRV

SEQ ID NO: 24788 - protein, 59 aa, Artificial Sequence
  Synthetic
DRVLKEIVEELRRLSEENKRRIERALEELEKLSKDNTDRIEEAREDLRRLVRELLEKEQ

SEQ ID NO: 24789 - protein, 57 aa, Artificial Sequence
  Synthetic
KDEEEVAKEIERLKEENDRVLKEAADKIEKLKKENREVNTRAAEEIERLKKELREKV

SEQ ID NO: 24790 - protein, 59 aa, Artificial Sequence
  Synthetic
SRVLEEVVRRLRKLSEENKKRIKEMLDDVERLSRRNEEKIRRVLEDARRLLEDLTRKAK

SEQ ID NO: 24791 - protein, 57 aa, Artificial Sequence
  Synthetic
SEKETVAEEIRRLIEKNKKMLEDHTRDIRRLEKENDDVNRKHHEDIRRLKDRLRKEV

SEQ ID NO: 24792 - protein, 59 aa, Artificial Sequence
  Synthetic
SRVLKEIVDEARELSKRNEDKIRKSLEELKRLSERNKKKIEDTLKELRKLAEEVKRRAT

SEQ ID NO: 24793 - protein, 57 aa, Artificial Sequence
  Synthetic
SEKERVADDIRKLEEENKEVLDRAAEEIKRLKKRDRELNKRHHKTIRDLVDELEKKV

SEQ ID NO: 24794 - protein, 59 aa, Artificial Sequence
  Synthetic
SRVLDEIVKEARDLSEENRKLIEEALERLRRLSRENEETIKKTMEELKRLVEEVKERAR

SEQ ID NO: 24795 - protein, 57 aa, Artificial Sequence
  Synthetic
KSKEEVADKIRKLKEENRKVLERHTREIEKLKRDDEEANKKHHEDVKEVMKRLEKEV

SEQ ID NO: 24796 - protein, 59 aa, Artificial Sequence
  Synthetic
DRVLEEIVREAEELSKRNKDRIDESLKELRKLSEDNKREIERTLEEIKRLAEEVRRRDT

SEQ ID NO: 24797 - protein, 57 aa, Artificial Sequence
  Synthetic
SSKERLKEMIDRLKERNKDLLRKAAEEIKRLEDEDREVNRRHHEEIERLKKELREKV

SEQ ID NO: 24798 - protein, 59 aa, Artificial Sequence
  Synthetic
DRALDEIIKEAKKLSDDNERLIRDVLRRARDLSRRNKETIRRTLEKLKREAEKVKEDAR

SEQ ID NO: 24799 - protein, 60 aa, Artificial Sequence
  Synthetic
SDADRIIEEARRLSEENKRRIEEVLKRNRKLSKENHDKNDELLKRVRELLRRVVERLRRE

SEQ ID NO: 24800 - protein, 59 aa, Artificial Sequence
  Synthetic
KDKLKRLEDEVRKLTDENRRVTEKAERDLRRSNRENDRSTERLEEEIRRIKKRLRDEAR

SEQ ID NO: 24801 - protein, 60 aa, Artificial Sequence
  Synthetic
REAEDLIRRLRELVRRHHELNRKLAEELRKLSEENKRKIEKVTREVEKLVKDVADTLKDD

SEQ ID NO: 24802 - protein, 59 aa, Artificial Sequence
  Synthetic
KDKLKRLEEELERLKEEVRKSNRDLEKEVRDLRKENEKVTEEVKKRIEDLKRKLDEDRR

SEQ ID NO: 24803 - protein, 60 aa, Artificial Sequence
  Synthetic
SEVDKIIKDARDLLKEHHEKNKRLIEENRRLSEENKDRIRRALEKLKKLVDDLRRLIEEV

SEQ ID NO: 24804 - protein, 59 aa, Artificial Sequence
  Synthetic
KKKLDELETEVRRIKETIDRSNERLERELEKSNRENKKVTDDAREVVKKLKEEIKRDED

SEQ ID NO: 24805 - protein, 60 aa, Artificial Sequence
  Synthetic
SEADEIIKEAKKLADDHHRLNKEIIERNKRLSEENHKLNEKIIEDVRRLVKDVAERLKRD

SEQ ID NO: 24806 - protein, 59 aa, Artificial Sequence
  Synthetic
KEKLDRLREKVEEIKRRVDKSNDELRRSMEESNKRNDESTDRLREELRRLDEELDRRRK

SEQ ID NO: 24807 - protein, 60 aa, Artificial Sequence
  Synthetic
SDLERVLKELRELVRRHHELNKDIIRRARRLSEENEKDIKKLLDDARKLLEEVKRTLDRM

SEQ ID NO: 24808 - protein, 59 aa, Artificial Sequence
  Synthetic
KKKLDEARTELRKLEEEVDKSNKELRDEVEKLERRNDELLERAREEVERLKEELRRKAT

SEQ ID NO: 24809 - protein, 60 aa, Artificial Sequence
  Synthetic
SKAERIIEEVRRLSEDNKRRIKKLLDEAKELLDRHHKRNKELLEEIERLLREVKERLKKD

SEQ ID NO: 24810 - protein, 59 aa, Artificial Sequence
  Synthetic
KDRLEELRRDLERLRKENKDVLDRVREDIKRLKEELDDSNRRLKDTIEDLKRELDEEAR

SEQ ID NO: 24811 - protein, 60 aa, Artificial Sequence
  Synthetic
SEVEELVKDLKRILDEIKRTNDELNKELKRLSDESRKLSKENIDRLRRILEEIEKTIRRR

SEQ ID NO: 24812 - protein, 59 aa, Artificial Sequence
  Synthetic
EEKVRKLEKLLEDIKRTVDKIIRESEKRAEEINRDNRRIIEENKKKLEEIARRVEELAR

SEQ ID NO: 24813 - protein, 60 aa, Artificial Sequence
  Synthetic
SSIEELAKRLEDLIRELRDRHRRLNEELKELTDRNRKEIEEANERIKRLIDDLERLRRRG

SEQ ID NO: 24814 - protein, 58 aa, Artificial Sequence
  Synthetic
EEIDKLRRELERLEEELKKVLDRTREELERLVRDNRRLNKEHKDHSDTLVRRLEESRK

SEQ ID NO: 24815 - protein, 60 aa, Artificial Sequence
  Synthetic
SEVEDLIRDLERLLKEHDELNKRSMEELEKLLKDLEKMVRDSLREAREIAERVKETIKRT

SEQ ID NO: 24816 - protein, 59 aa, Artificial Sequence
  Synthetic
EKKLDEARKVLEEIKKRLEDSLRRLREEAERIKRELKRILDEHRKEIERIKKEIDEAAR

SEQ ID NO: 24817 - protein, 60 aa, Artificial Sequence
  Synthetic
SEIEKVLRDVEKLVREHEDLNKKSAEEAERLTRDNKRRVDESKKRIREILKEVDEIIRRT

SEQ ID NO: 24818 - protein, 59 aa, Artificial Sequence
  Synthetic
DKDLRRLAEEAERIKKRLRDSLDELRKIIEELEERNRRINEDHRRDLEDVKRRIEEKSK

SEQ ID NO: 24819 - protein, 60 aa, Artificial Sequence
  Synthetic
SEIEEVARRAEKLTKENEELIRRSLRDIERLVKEMEDIVRKSLKEIKELVERLKDISRKT

SEQ ID NO: 24820 - protein, 59 aa, Artificial Sequence
  Synthetic
DEKLRRLAKRIEELKKRNEDLNREHRKRLEEAEKRLKDVLDEHRRRLEEVKKELDEEAK

SEQ ID NO: 24821 - protein, 60 aa, Artificial Sequence
  Synthetic
DEIERVLEEIKKLTDDNRKLVKESIDRAEELLKRHEEENKKSVERARKLVRDLDEIRRKT

SEQ ID NO: 24822 - protein, 59 aa, Artificial Sequence
  Synthetic
KKKLDELARRAEDMERDNKRINKEHRERIKEIKERIKESLDRLAEEIKKIEKELEDKAR

SEQ ID NO: 24823 - protein, 60 aa, Artificial Sequence
  Synthetic
SEIEKVLEDAKKLTKENEDLIRKSLEDNERLLRRHEEENKKSAEDMRDLLRRLEDIIRKT

SEQ ID NO: 24824 - protein, 59 aa, Artificial Sequence
  Synthetic
EELLERLAREIKKLIDKNRKLNEDHRRESEKSERRLRESLRKLAEEAERIEREMDKSRK

SEQ ID NO: 24825 - protein, 60 aa, Artificial Sequence
  Synthetic
SKIEKIVRDAERLLDELRKLAEDVLRRLEELNRRAEDVIRRLAEENTELLKRLEDLLETE

SEQ ID NO: 24826 - protein, 59 aa, Artificial Sequence
  Synthetic
KKKAEELKRKAEEIKRRIDKIVDEVRKAIRDSAEHLKRLLEEYRRRVEEVKKRVRDAAK

SEQ ID NO: 24827 - protein, 60 aa, Artificial Sequence
  Synthetic
DELERLREEVKRLSEENKELIKEMEKRNRELSKENEKVNRELKKRVDDIIRTLKELRKEG

SEQ ID NO: 24828 - protein, 62 aa, Artificial Sequence
  Synthetic
EKEEREIRRVLEDIKRIADENERENREALKRLEETNKRNTDHNRDVLREIDKLFREVAEELR

SEQ ID NO: 24829 - protein, 59 aa, Artificial Sequence
  Synthetic
SEKEEVIKRIREELKENEKENRDVIRKIRELLDELRRRVEEVLRRLKKSNEDIEREAEK

SEQ ID NO: 24830 - protein, 56 aa, Artificial Sequence
  Synthetic
EEELKERIKKLSKENKDRVRRMLERIKKLVDDLRRLLEELRRRNEKLLDRLRKAIK

SEQ ID NO: 24831 - protein, 59 aa, Artificial Sequence
  Synthetic
KDEEKVIEDIRRILEENHRENKEVIDKIRELLRRNEEENKEAIRRMRKSNKEITDRAEE

SEQ ID NO: 24832 - protein, 56 aa, Artificial Sequence
  Synthetic
REELERRVRELSKENKEMLKRVEDKIRELSERNKRTVKKVREDNERLIRRLEEEDK

SEQ ID NO: 24833 - protein, 59 aa, Artificial Sequence
  Synthetic
SELERIEEDVERLNRRNEETLKRIDEALKRLEKSNKELDEKLEETVKRIKDRVERVKRR

SEQ ID NO: 24834 - protein, 62 aa, Artificial Sequence
  Synthetic
DKAKREVDKVRTDAREILKENKRRNEDVIRKIEEKVRDLERRNRDLLRRVKTKIDRLREELK

SEQ ID NO: 24835 - protein, 56 aa, Artificial Sequence
  Synthetic
KELEDIARRVDELNKRNEELIKDAKRVLKEASDKNKEMNERVDDKLRRLAKKVKEL

SEQ ID NO: 24836 - protein, 62 aa, Artificial Sequence
  Synthetic
KEERDKIRDLLRRIREKIEKNRKDAEDVLREIKKLIDENKKRNEEVLKKIEELLRELEKRLE

SEQ ID NO: 24837 - protein, 61 aa, Artificial Sequence
  Synthetic
SRLEKVIKEIKKTHEELERRFKKNSDEAEESLKRLEDELRKVVTDIERKLRDLERRVREAG

SEQ ID NO: 24838 - protein, 59 aa, Artificial Sequence
  Synthetic
EELITRLKKHVDDTAREVEELIKRHTEHNEKLRRDIKKLLEELKRKVDELRKEIETRTR

SEQ ID NO: 24839 - protein, 62 aa, Artificial Sequence
  Synthetic
SELEELIKRAEDTIRRLEREIDELIERHRRSAERLRETLKELIDRHRKSIEDVMRELKRRRG

SEQ ID NO: 24840 - protein, 56 aa, Artificial Sequence
  Synthetic
KEEIERLIKELEKKIKEVVKRIRDIDEDLKRKAKKVVDDLRELNERLERKAKEATK

SEQ ID NO: 24841 - protein, 60 aa, Artificial Sequence
  Synthetic
SEEERLRDHSRRVEELARRAAEKLRRHSEDVKRLITELIKLIEDVMKKIEDEVRDAEKRG

SEQ ID NO: 24842 - protein, 61 aa, Artificial Sequence
  Synthetic
ELKKRIDELHKRNKDKLDEISERLKRLLEENRKLIKEVEERLRKLLEDLRKLIEDVKRRLR

SEQ ID NO: 24843 - protein, 60 aa, Artificial Sequence
  Synthetic
DFEEEIRRNLKRVRDLAKKLEDLIRKHSEEVKRLAEEVKREIEEVIKRAKKKMEDVRRDG

SEQ ID NO: 24844 - protein, 61 aa, Artificial Sequence
  Synthetic
ELKKRADRLLDEHREELKRIEDRLRELLERNNRLLEDIDRRLKELLEDLRRVLKEIEEELR

SEQ ID NO: 24845 - protein, 61 aa, Artificial Sequence
  Synthetic
SEVERLLEDLRRLAKESDESLKKSHRELRKRHEEVRRTIEELLKDLERTVKEIKEELERDV

SEQ ID NO: 24846 - protein, 60 aa, Artificial Sequence
  Synthetic
EEDVRREIKRVLDTIRKLNEDWKRRNEESKRRLDKLLDDAKKAIDKIVEDVKKLLEDARR

SEQ ID NO: 24847 - protein, 61 aa, Artificial Sequence
  Synthetic
SEVEKLLRDLERLARRVREELRKSHEKLDKLARDSKKSIEDLLEDLRRIIEEIEEELDRRV

SEQ ID NO: 24848 - protein, 60 aa, Artificial Sequence
  Synthetic
REDVEREVRRIKREIKELLDRWRRANEEIAREIRKLNEEVKRRVEKILRDLEELLRRLRK

SEQ ID NO: 24849 - protein, 61 aa, Artificial Sequence
  Synthetic
SELEKLEKELKDLLDKIRRDLEKSLKENDELVKKIEEDLKDLLKKLDDRLEKVARDLKREK

SEQ ID NO: 24850 - protein, 60 aa, Artificial Sequence
  Synthetic
RETATKRVKEVLDKLRKMLEDLRRHNEENKRRNKEVLDELRKKAEDVLRRIDEALKELKR

SEQ ID NO: 24851 - protein, 63 aa, Artificial Sequence
  Synthetic
SVEEMETRLKEVADDLKKKIDEVLTRLEKLNRELTKRSRDMNRELERLNKEAEDRARDVLKRV

SEQ ID NO: 24852 - protein, 59 aa, Artificial Sequence
  Synthetic
RDEARKLLRDLERLIEEIKKTLDELLKHHKEELDRIDREHEELLRHHKKTLERIEEKID

SEQ ID NO: 24853 - protein, 60 aa, Artificial Sequence
  Synthetic
DRVEKVLREIEKRLRDHRKRLKDALDEIRKRIEEHEEKSERLNRESKKLLKDLEDMKRRG

SEQ ID NO: 24854 - protein, 56 aa, Artificial Sequence
  Synthetic
EEVVRRARELVKRLEEDHRRMVEEIRRTIKRAEERHKKSVEDNEKLLRDLRDRLEK

SEQ ID NO: 24855 - protein, 60 aa, Artificial Sequence
  Synthetic
SEVEKVLEDLKRLLDEHEKRSRELNKRSKKLADEARRINEELLRELKKLLDELKELKDRG

SEQ ID NO: 24856 - protein, 56 aa, Artificial Sequence
  Synthetic
KKFLDDMRRLLEELKERHERSERENRKLLRKLEEDSKRTNDESKKLLDKLRDDLEK

SEQ ID NO: 24857 - protein, 60 aa, Artificial Sequence
  Synthetic
DRVEEVLKRVEELVKRHDERLKELEDDLRRLIEEHLEKSRRLNKESEKLLKEILEVKRRG

SEQ ID NO: 24858 - protein, 56 aa, Artificial Sequence
  Synthetic
EEVVKTIDEIVKELRKRHEEVRKRLKELLDEMRERHERSVRRNRERLEKLLDDLRK

SEQ ID NO: 24859 - protein, 60 aa, Artificial Sequence
  Synthetic
SEVERVLRDVERLLEEHRKKSKEANDTSRELARRHKEESDRLNKKSEDDARRLEDVKRRG

SEQ ID NO: 24860 - protein, 56 aa, Artificial Sequence
  Synthetic
EDMVRRIREIVKKLKRDHEKSVEDNRRLLRELEERHRESVERNEDLLRRLEERARK

SEQ ID NO: 24861 - protein, 60 aa, Artificial Sequence
  Synthetic
DEVETVLRDLKRLLDEHRRRSEELNKRSEELLREHEERSKRLNERSEKLARELREMKKRG

SEQ ID NO: 24862 - protein, 56 aa, Artificial Sequence
  Synthetic
EEFVKRMDELLRKLEEDHRRSVRENEKLLEELRRRHKKSVDDNRRLLEKLKRDADR

SEQ ID NO: 24863 - protein, 60 aa, Artificial Sequence
  Synthetic
DEVEEVLRRIEELLTRHRKKSDDLNRRSEELAERHERTNRTLLEELRDLAKKLEDLKREG

SEQ ID NO: 24864 - protein, 56 aa, Artificial Sequence
  Synthetic
EEVVKRMRDLVRRAKEEHKKSVDDNRRTLKELHDRSKKTNDDSRELLKRLEDRLRK

SEQ ID NO: 24865 - protein, 60 aa, Artificial Sequence
  Synthetic
REAEEVLERIRRRLEEHLEDNERILREIKKRLDEHREKSKRVNDRSRELVERLLAVKREG

SEQ ID NO: 24866 - protein, 56 aa, Artificial Sequence
  Synthetic
EDIVREIRRIVRELHERSKDSNREVERLVRKLEDDHRESVERNRELLKKLEDDLRR

SEQ ID NO: 24867 - protein, 56 aa, Artificial Sequence
  Synthetic
RLEDVLREVREDLRRLNEESRKVLEENDKLDKDLNRRLKRLEEEARTEIKKVKDRL

SEQ ID NO: 24868 - protein, 60 aa, Artificial Sequence
  Synthetic
EDELEKRLTEVRKELEDRYRELIERSKDIIRRLEEEVRKLEKELRKVLEDLDRRAREATR

SEQ ID NO: 24869 - protein, 59 aa, Artificial Sequence
  Synthetic
SEREDIKRLIEEIRKLVDEAAKEIERNIEEIRRLVKELEELSKKHIDEAREILERLKRR

SEQ ID NO: 24870 - protein, 55 aa, Artificial Sequence
  Synthetic
ELVEEMERDVREVERALRRLLDKHRRVLEDVERRLRRALEENRRVLEEIEEDSRR

SEQ ID NO: 24871 - protein, 58 aa, Artificial Sequence
  Synthetic
KDEEATKKLRKAHEDSERHIKKLSEDTKKVHEESDRHIRKVSKETEDEARRIEKELRK

SEQ ID NO: 24872 - protein, 56 aa, Artificial Sequence
  Synthetic
EDTLEKIIEENKRLNDELAKENKEVIKENRKLNRELEERNKEVIDRMERILEETKR

SEQ ID NO: 24873 - protein, 58 aa, Artificial Sequence
  Synthetic
REEELKREMEKAHEESERHLEELSRKTRDVHRRSEEHLKRLHERTKEVVDRIVEELRR

SEQ ID NO: 24874 - protein, 56 aa, Artificial Sequence
  Synthetic
EETLRRVIEKNRKLNEDIAKRNEEVIETNKKLNEEIARRNEEAIKTARKIVEDTKR

SEQ ID NO: 24875 - protein, 58 aa, Artificial Sequence
  Synthetic
REKEVVDRLREEVRRVEEEVDRLNKELEEIARKVERELDKINEDYKRRLDKVREDIKR

SEQ ID NO: 24876 - protein, 56 aa, Artificial Sequence
  Synthetic
EETVKRILETARELLDRWKKEVDEIVKTLEELLDRWRKEVERVKRENDKLLEELEK

SEQ ID NO: 24877 - protein, 59 aa, Artificial Sequence
  Synthetic
DEKKVLDDLRRIVEKVKRDLDELLKDNRRVLREVEEELKRLNEELRRIAEEVTRELRRL

SEQ ID NO: 24878 - protein, 56 aa, Artificial Sequence
  Synthetic
EKLAEEVARELRRLLREAEETSRDTKRKLREVLREWRELVKKIVDEMRRLLEEIKR

SEQ ID NO: 24879 - protein, 60 aa, Artificial Sequence
  Synthetic
DLERLVEEIKRRLRELLKELHKKSKEIEEEIRRILKRHHELLERIVRRLEELVEEVKRRN

SEQ ID NO: 24880 - protein, 56 aa, Artificial Sequence
  Synthetic
KKLLEDLEREIEKVKKAARDDLRRLEEIVRDVERRLRENVKRLKEEADRVKEELEK

SEQ ID NO: 24881 - protein, 60 aa, Artificial Sequence
  Synthetic
EELERIKDEIRRILEELKREMEELTKESDRILRELERENEESAKRIKEILDELEKRVRDK

SEQ ID NO: 24882 - protein, 59 aa, Artificial Sequence
  Synthetic
ETLLRRLRESLEKLAKEVEDLLRKYERDVRELAKEDRKLNEELLKRVDDLAKEVRERLR

SEQ ID NO: 24883 - protein, 61 aa, Artificial Sequence
  Synthetic
SKLEEIERELRELERSNEEEDRKWDDTTRKLEEDNREKNREWKKLTKDIRERVERLIRDLK

SEQ ID NO: 24884 - protein, 58 aa, Artificial Sequence
  Synthetic
EEARRLDEELEKVLRELKKRNEDTERRDREVNKKLEKENRDSEKENRDVLREIERALR

SEQ ID NO: 24885 - protein, 58 aa, Artificial Sequence
  Synthetic
KKLEDLEEEIKKLLEELKERNERSAREDREILERLRDENRRTAEELDKSVREILKKTG

SEQ ID NO: 24886 - protein, 59 aa, Artificial Sequence
  Synthetic
DRKLKEVRDTLEKLREENRKLNEEWRRKSEELRRRNEKVNKEVRDRNRETIERVDRKAK

SEQ ID NO: 24887 - protein, 61 aa, Artificial Sequence
  Synthetic
EELERADRRLDRLLEESERDLDTIIRKLKKVVEELERTLEEAKRKAERTLEEIRRELKEAG

SEQ ID NO: 24888 - protein, 60 aa, Artificial Sequence
  Synthetic
VEDLLREIKELLDDLRRHNEKLHRELEELIKTLRRHNEKLLEDIERLLRELRKEVEKLRR

SEQ ID NO: 24889 - protein, 60 aa, Artificial Sequence
  Synthetic
DELRELRRELRKLLEDIRRRLEELTRENRDVLRKSREELERLLRRLKELLDRIRDSLRKR

SEQ ID NO: 24890 - protein, 56 aa, Artificial Sequence
  Synthetic
KDKMKKLLRDLERKLKRAEEESKRHIRENEKLTEEAARKVEELLKEIKRKLEELEK

SEQ ID NO: 24891 - protein, 55 aa, Artificial Sequence
  Synthetic
SVEDTIRELEKRIRDLNREMERLNRESVEKIKRLNEKVRREIEDILREIKRLAEN

SEQ ID NO: 24892 - protein, 55 aa, Artificial Sequence
  Synthetic
ESLRRKLKKLADEHRETVDRMHEKNRKLADDHRDSVRKLEERIKRLTDRLREERK

SEQ ID NO: 24893 - protein, 56 aa, Artificial Sequence
  Synthetic
SEVEETLKRLEEVIREAEKTIDDSNREIEEAVRRIKTTIEKSNRDLKDLVEKLKRL

SEQ ID NO: 24894 - protein, 55 aa, Artificial Sequence
  Synthetic
EDVRRRVKEIIDKLERKIEESERNLKRIIEDLEREMRESEERVKEIIRDLERTEK

SEQ ID NO: 24895 - protein, 57 aa, Artificial Sequence
  Synthetic
SEIDEVLKRVEDSVREIERKLEEIERRLRRLNEEVKKRLDEIEEEIRRLVEELRRRN

SEQ ID NO: 24896 - protein, 59 aa, Artificial Sequence
  Synthetic
DDRLREIEKRIDDLNKKVRDEVERLKREADKSLETIKRLVEELKEKLDRLLEEVREEVR

SEQ ID NO: 24897 - protein, 59 aa, Artificial Sequence
  Synthetic
STRERLKKVLRDVERANKELSDRNKRVLEKLRRDVERLSRENEKLVRELEEAIKDLRRK

SEQ ID NO: 24898 - protein, 55 aa, Artificial Sequence
  Synthetic
EDLRREVEEVLKRIRDSNRDNRRKNEKVKKDIREILRRNEKRNREVNEKIRRDET

SEQ ID NO: 24899 - protein, 60 aa, Artificial Sequence
  Synthetic
KETEEVKDVLRRVRKRIEDLSKKNKDDLRRVEERNKELNERVKRLLEELKRRVDDLKRKG

SEQ ID NO: 24900 - protein, 58 aa, Artificial Sequence
  Synthetic
EDLERVEEDVRRVIKEIRDLARENHEENRDVIRRIRESNKRTEDEAREVLDRIRKTAT

SEQ ID NO: 24901 - protein, 56 aa, Artificial Sequence
  Synthetic
KEREEAEEMLKRLEEELRRLLEESEKIIERSERHLEKLLKDAEDEIRRVKEELDKI

SEQ ID NO: 24902 - protein, 59 aa, Artificial Sequence
  Synthetic
REEIRRLIERLRELLEEIARRIEKTNRELEELNKRLADDIKRLIDELERVLREVEERSR

SEQ ID NO: 24903 - protein, 56 aa, Artificial Sequence
  Synthetic
DEVETLLEEARKVLEELRKKIKELNEDSKRVLEELEKRIRDLDRRSTEVLRRLEES

SEQ ID NO: 24904 - protein, 55 aa, Artificial Sequence
  Synthetic
EELEDALRKIRKAVEELKKDVRRTLEEIKKEVKRLIEEARRSLDKIRRDVEKRDE

SEQ ID NO: 24905 - protein, 56 aa, Artificial Sequence
  Synthetic
EEVKRLVDDLREVTKENEKRARDLDRDSKRVSEENARKIETLNRDNERVNKELADS

SEQ ID NO: 24906 - protein, 55 aa, Artificial Sequence
  Synthetic
EKLDEDLERLERRNRKINEDAKTTLREIERENEELNKRLEETLRRSEKHLRDRRK

SEQ ID NO: 24907 - protein, 61 aa, Artificial Sequence
  Synthetic
REVEKLIKELEDLNRDHARKVKELIAELEKLLRDHAEKVRKLIEEARKTLEDLREIVERKG

SEQ ID NO: 24908 - protein, 55 aa, Artificial Sequence
  Synthetic
KDVREMIRRSEENLKRLNEEVKRAIRKVEEDLKELNKRARDVLEELRKRVEDTFR

SEQ ID NO: 24909 - protein, 57 aa, Artificial Sequence
  Synthetic
SEEEELEKRLRDSEREIEKWLRDLERVIEEVAREDKKIHEELEKILEDVKRELDKLG

SEQ ID NO: 24910 - protein, 59 aa, Artificial Sequence
  Synthetic
SKVVEKLVEDLRRINEEAKRRLERLKEELRKVLKDYKDEIDKLVEELKRTLDEVRKKAK

SEQ ID NO: 24911 - protein, 57 aa, Artificial Sequence
  Synthetic
DEEEDVRRTLEKVERDVERIDEDVERELRKVEEDDKRLHKELSEVVEKVERDIRRTG

SEQ ID NO: 24912 - protein, 59 aa, Artificial Sequence
  Synthetic
KKKLEELKERLKEALKRHEDKVRELKKELKKILDDYTEDVKRIKERLKRILEEIRRRKK

SEQ ID NO: 24913 - protein, 57 aa, Artificial Sequence
  Synthetic
SSEEDVKRELERVRREDERIHRDLERVLEESERRVETWDRDAKRTLEKVEEDLRRDG

SEQ ID NO: 24914 - protein, 59 aa, Artificial Sequence
  Synthetic
EELLEELKRRLKEILDRYRREAERLKRENEEMNKRHRERLEELKKRLKELLERMKEARK

SEQ ID NO: 24915 - protein, 57 aa, Artificial Sequence
  Synthetic
STEEDVRRVMKKVEDDVREINRDLERDLRRVEEAVERLDRDAKREIDRLREEIDREG

SEQ ID NO: 24916 - protein, 59 aa, Artificial Sequence
  Synthetic
EKFAEDLKRKLKKVLDEHRRRIEELKRELEEVLERHARELKRLKDELKKLVDDIRRRRK

SEQ ID NO: 24917 - protein, 57 aa, Artificial Sequence
  Synthetic
SDEEDVERELKRVKDEVDKINEDVRRELRKSEEDVERWDEDLERVVRRVEEEVRKTG

SEQ ID NO: 24918 - protein, 59 aa, Artificial Sequence
  Synthetic
KKVLEKLKKDLRDALKRHRDRVEKLKEENRKLNEDHKKTLEDIKEELKRLLDELKETRR

SEQ ID NO: 24919 - protein, 57 aa, Artificial Sequence
  Synthetic
SDEEDVERELERVKRDVERLDEDAKRVLDEVRKAVEEINRDVERDLRRVEEEIKKTG

SEQ ID NO: 24920 - protein, 59 aa, Artificial Sequence
  Synthetic
KEKLKELKERLKRLLDEHRRELKRLKDELKKALDDHKRKVDKLKKELKDILKKIRDDRR

SEQ ID NO: 24921 - protein, 57 aa, Artificial Sequence
  Synthetic
DDEDDVRRVLRRVAEEVRKLDEDLKRVLKESKERVKRWNDDAKRRLDKVREDLKRKG

SEQ ID NO: 24922 - protein, 59 aa, Artificial Sequence
  Synthetic
KKVLEELKKRLEDLLKRHEEEVRRLKEENKKLNDDHRRELERLKKELTDLLKRLDDERK

SEQ ID NO: 24923 - protein, 57 aa, Artificial Sequence
  Synthetic
SLEEDVKRVIDRVREAVKKINDEVEKELRKSEKAVEDWNRRLEEIHDRARRELEKAG

SEQ ID NO: 24924 - protein, 59 aa, Artificial Sequence
  Synthetic
KDKLEELKRRLKRLLDEHRKRVEELKEENKRLNKEHEKKVEDNVRRVRELLKRVEDRRR

SEQ ID NO: 24925 - protein, 60 aa, Artificial Sequence
  Synthetic
SEVEEIVKKLEELLRRWEKTVRDIVEELKRLLEEIEKLSRETKERLKKILEDVKRLAEEG

SEQ ID NO: 24926 - protein, 55 aa, Artificial Sequence
  Synthetic
DELEDIARRVKEELDRLNEELERIARKVKEDLKRLLEDNKRVLDEVKERLDRIRK

SEQ ID NO: 24927 - protein, 59 aa, Artificial Sequence
  Synthetic
SEIEDIVRRLEELLERWKRRVDKAKERNKRLLEKWAKEVEDIKRELEKLLEDVRRLKEE

SEQ ID NO: 24928 - protein, 55 aa, Artificial Sequence
  Synthetic
DELEKIVEDVERELDKINEDYNRVLKRVEEELDRLNEDLNRVAKRVKDALRKIEE

SEQ ID NO: 24929 - protein, 59 aa, Artificial Sequence
  Synthetic
SEIEKVVEEAKKLLKRWEDEVRKHDKELKEVLDRWKKEVDDIKRRLEELLREVRRLKEE

SEQ ID NO: 24930 - protein, 55 aa, Artificial Sequence
  Synthetic
DELRKIVEDVERELDRLNDENRDSLRRVVEALEEINKDLNRDVKRVKDELDKTRK

SEQ ID NO: 24931 - protein, 59 aa, Artificial Sequence
  Synthetic
SEVEEIKKELKKLDEENKRVIDRIVREIERLNEENERVARKVIKEIEELLRKLEKLRRD

SEQ ID NO: 24932 - protein, 55 aa, Artificial Sequence
  Synthetic
EDLRRVLKESEDRNRKLLEDLERKVRDVKRRDDELLKRAREALKRVKDEIEKIRK

SEQ ID NO: 24933 - protein, 59 aa, Artificial Sequence
  Synthetic
SEVEDIIRRIKELDDRNERKVRELVKTNEKLLRDLHEKSKRIVKEMRELLKEIEDLARR

SEQ ID NO: 24934 - protein, 55 aa, Artificial Sequence
  Synthetic
EELKRVIDESKKRNEKLMRDYEEISKKVHEDVERDAERLRRIAKEVEEELERVRK

SEQ ID NO: 24935 - protein, 59 aa, Artificial Sequence
  Synthetic
SEVEKIKEDLKRLLDEVRKKAEELKRENRELLRRLHELSKKIIRELEKLLEELADLVRK

SEQ ID NO: 24936 - protein, 55 aa, Artificial Sequence
  Synthetic
EDLERTIREVEKELRRLLEDYRRESKKVHEDIDEDRRRLEDAVREVEKEIEKVRR

SEQ ID NO: 24937 - protein, 60 aa, Artificial Sequence
  Synthetic
SEVERIKEDIKKSNEDIRRTAEEIKERIKKSNKEVEDEVREIKERIKRILDKLKRVKEEG

SEQ ID NO: 24938 - protein, 59 aa, Artificial Sequence
  Synthetic
KSVVDDLERVMKESEERVKRIIDDLERTLRESEKNLKRIIDDLERVMREAREAIDRLKK

SEQ ID NO: 24939 - protein, 60 aa, Artificial Sequence
  Synthetic
SEDDELRRRLEELKRRIEDLIRKLREVLKRSEDELRKILRELREVDKDLRRRIEELIKDI

SEQ ID NO: 24940 - protein, 56 aa, Artificial Sequence
  Synthetic
EDEAKKRLEEILRRAEELLERLKRTNERVNRKVREDMKRAKEHAKRLLEEAEELAR

SEQ ID NO: 24941 - protein, 57 aa, Artificial Sequence
  Synthetic
DEVEELIKEVEKVNEDAARESEKRNRELKKMLERVKRENKRLIRELKELLDDARRKN

SEQ ID NO: 24942 - protein, 59 aa, Artificial Sequence
  Synthetic
REVLKKLEEVLRESKKRLKEWNDRNKKTLDDIRREIEKSKKEHEDALRRIEEELKKTET

SEQ ID NO: 24943 - protein, 57 aa, Artificial Sequence
  Synthetic
SELEKLVKELRDLNEKVARDSKRLNDKLEEVLDRLRRRNEELIKRLEEVLEDVERKN

SEQ ID NO: 24944 - protein, 59 aa, Artificial Sequence
  Synthetic
KELLDRLRKMLKESRDSLRKLNKENEETLRRIKKKLDESKRKHEEVLKDIKRRLEELSR

SEQ ID NO: 24945 - protein, 57 aa, Artificial Sequence
  Synthetic
DEVERIIERLRRVNKRVREENERLIKEIEDLITEIAKRSRDLNRELDKTLKDVRRKN

SEQ ID NO: 24946 - protein, 59 aa, Artificial Sequence
  Synthetic
EEVLRRLEKVLRESRKSLEDSAKKHKDVLDEVKKTLKKLNDENREVLKRIKKELDKTRT

SEQ ID NO: 24947 - protein, 56 aa, Artificial Sequence
  Synthetic
SEVEKLIEDMKKVAKELADESEEHIKRAEEVIDRLAKEVEKHDRDVEDTIRRLEES

SEQ ID NO: 24948 - protein, 59 aa, Artificial Sequence
  Synthetic
EEVKKRLREMLEELRRRLERLKDKNKEVLDRLEEKLRKLEKENDDSLKEAEDKLRERER

SEQ ID NO: 24949 - protein, 56 aa, Artificial Sequence
  Synthetic
SEVEKLIEDIERIIRTLAEEVRRHDEDARRVLEDLARKVRKHNEDVKKVLEDLRES

SEQ ID NO: 24950 - protein, 59 aa, Artificial Sequence
  Synthetic
EEMKERLRRMLKRAEDELRRLEEENDRVVERLERELRRLTEDNKRTLKKIEEDLRRREK

SEQ ID NO: 24951 - protein, 56 aa, Artificial Sequence
  Synthetic
DEVRDLIRRLEETVKRLADEVREHDKRARDILRELKKEVKETNRRSEKVADDLEKS

SEQ ID NO: 24952 - protein, 59 aa, Artificial Sequence
  Synthetic
EEVKERLKKVLEKLKRDLEKLKEDNRRVLKELEEELRKIKEELDKSLDDLRKRLEDRKK

SEQ ID NO: 24953 - protein, 60 aa, Artificial Sequence
  Synthetic
SLEEKFRRVLEESKESLERLKRKVEKVLRESEERLKRWLDKVKKVLEEVDDALRRLKDRL

SEQ ID NO: 24954 - protein, 59 aa, Artificial Sequence
  Synthetic
KEIVERLIEELKKLNKELADRLEEIIRRLEEINERLRERIERIITRLRRLLEELEREAE

SEQ ID NO: 24955 - protein, 60 aa, Artificial Sequence
  Synthetic
SEDEDLKRVLDEAEKRLKDLLDDLRRALKRSEDELRKNNEDLERVLKRVEERLKELLDRV

SEQ ID NO: 24956 - protein, 59 aa, Artificial Sequence
  Synthetic
REIVEEIKKRIRDLLRELEKKIEELKTTSERLNREHHKKIEDIKKEIEDLVRELEKKVK

SEQ ID NO: 24957 - protein, 60 aa, Artificial Sequence
  Synthetic
SLREKLEEVLRRIEEALERIREEVEKVLRDSRDDNRRVLKELKELLERVREALEDLLRKV

SEQ ID NO: 24958 - protein, 59 aa, Artificial Sequence
  Synthetic
DKIVKEIIEELEKLLRDIKKRARELIEESKRINEDNNRRAEEVAEEIRRLLEELERKLR

SEQ ID NO: 24959 - protein, 60 aa, Artificial Sequence
  Synthetic
SLEEDVKRVLREAEEELKKNNERLRKVIEDSKRDNDRVLDELRKVLEDIEKALRDLLREV

SEQ ID NO: 24960 - protein, 59 aa, Artificial Sequence
  Synthetic
DKIVDEVRKEIEKLVRDHHKRIKDLKDDLKRLNDENNKRAKEIIDEMKRLLEEIEKRVR

SEQ ID NO: 24961 - protein, 61 aa, Artificial Sequence
  Synthetic
KDVEDIKRRIEELNKKLKEKIERIKKRIKELNEEAAKKVEEIKERLKRLLDEIRELVRRDG

SEQ ID NO: 24962 - protein, 59 aa, Artificial Sequence
  Synthetic
DSLRKRLEEVLRESKKTAEDLKRDLRRALEESKKNLKRLLDEVRKVIDEIRKALEELER

SEQ ID NO: 24963 - protein, 61 aa, Artificial Sequence
  Synthetic
SEVEKIKKDIKDLNDDARRRLEEIKRRLEKLLKELEEKHRELKKELKKLLDEVRDLVRREG

SEQ ID NO: 24964 - protein, 59 aa, Artificial Sequence
  Synthetic
DRLREDAERVLRESKKNLDELEKDVRRVIKRIEDEARRLNEDLKRMLERIKRELEKLEK

SEQ ID NO: 24965 - protein, 60 aa, Artificial Sequence
  Synthetic
SEEERLEEVLKRVETELRRLKRELEKVLRESEEALREIIKKIEDAVRDNAEKVKKLSRTV

SEQ ID NO: 24966 - protein, 55 aa, Artificial Sequence
  Synthetic
RRVEKELEDLLRTATKVLEDLKRDLKRLNEETEEVVKTLEDSHRRSNEEVERRVR

SEQ ID NO: 24967 - protein, 60 aa, Artificial Sequence
  Synthetic
REREELEEVLERSKRELERLVEEIKRALDESRRRLEEIEKRIEEVIRRNKEEIKKLSRRV

SEQ ID NO: 24968 - protein, 55 aa, Artificial Sequence
  Synthetic
EKLKEELKELNRESRKVVEDLREKLDRLNKDTERVVRELEKEHRKSNEEVRKTVK

SEQ ID NO: 24969 - protein, 61 aa, Artificial Sequence
  Synthetic
DEEEELKEDIKRILEELRRLAKEHEELNRRINKELEDLVREHKKRLEDALKRLREIVRDRG

SEQ ID NO: 24970 - protein, 55 aa, Artificial Sequence
  Synthetic
EELEKVLKEAEDDVERIKKRLKRINDESRKHVERLKEELDRADKRIEDEVEKLKK

SEQ ID NO: 24971 - protein, 61 aa, Artificial Sequence
  Synthetic
RIEERLKRVVDKVDDTLRKSEKHLEDVVRDADRDIDRNRRENEKVVKEAEDILRRLVEEAG

SEQ ID NO: 24972 - protein, 59 aa, Artificial Sequence
  Synthetic
EDKVRELEEEAERLLDELRRKNEEAVRRIKKLLDDLNKHSEETIRRIKKLLKELEDKTR

SEQ ID NO: 24973 - protein, 57 aa, Artificial Sequence
  Synthetic
STEEKLKELKKEADKLLKELDKELRDNLRRLRKIVEELKKENRDLTRESEEVLKRLN

SEQ ID NO: 24974 - protein, 59 aa, Artificial Sequence
  Synthetic
DKDVKKLIEEIRRILEKAREEVERLSRDSKRVAEELRKRHKELIDRNKRVLEELKRRRD

SEQ ID NO: 24975 - protein, 60 aa, Artificial Sequence
  Synthetic
SEVEEVARRSRKLNDDLKKIIEELIRRSRKINDELRREIERLIRESRKLNRELEELKRRG

SEQ ID NO: 24976 - protein, 56 aa, Artificial Sequence
  Synthetic
EDKVRRLNEENKESLRRLERELEKLNKENEDSLRTLEELLRELNKENKRSLDELRK

SEQ ID NO: 24977 - protein, 56 aa, Artificial Sequence
  Synthetic
SLVEEVEERVKKLHDENRELDRKSKRDVEEVHKKNEKLIKDVERTVREMIRKLREL

SEQ ID NO: 24978 - protein, 56 aa, Artificial Sequence
  Synthetic
EEELRRLEEELRRSIKESREELRRLEDELRRSIEKLEDALRRLAKELDEVIKDLKD

SEQ ID NO: 24979 - protein, 56 aa, Artificial Sequence
  Synthetic
SLVDEVRRRVDELHKDNKRLDDESEKKVRDAHRENERLDDESRRKVKEAIRKLEEL

SEQ ID NO: 24980 - protein, 56 aa, Artificial Sequence
  Synthetic
KESLDRLAEKLKKSIKESEDILRELEKRLRDSIRESRKILEDLRRELEEVIKRLED

SEQ ID NO: 24981 - protein, 56 aa, Artificial Sequence
  Synthetic
SLAEEVEKRVRDLHRKNEELDRESEKKVRDMDRKNKELIKRAEEEVKKVIDKLRKL

SEQ ID NO: 24982 - protein, 56 aa, Artificial Sequence
  Synthetic
EEKLRELARRLKESIRESRERLRRLEKELEDSIRELRRAIDTLTKRLEKAIEELER

SEQ ID NO: 24983 - protein, 56 aa, Artificial Sequence
  Synthetic
SLVEEVERRVRKLHEENKKLDKESEDKVREANRRNEELIKKVTESVRRMIEKLRRL

SEQ ID NO: 24984 - protein, 56 aa, Artificial Sequence
  Synthetic
EEELRRLADELRRSIEESERILKKLEEELRRSIEELRRALEELDEELKRVIRELER

SEQ ID NO: 24985 - protein, 56 aa, Artificial Sequence
  Synthetic
SLVEEVKKRVDDLHKRNRELDDRSEKMVRKANEENKELDKKSKEDVDRLIERAERL

SEQ ID NO: 24986 - protein, 56 aa, Artificial Sequence
  Synthetic
EEELRRLAEKLKRSIEESREILKELERRLRESIRRSREILKRLKEELERAIERLRR

SEQ ID NO: 24987 - protein, 56 aa, Artificial Sequence
  Synthetic
SLAEEVEKLVRDLHRKNKELDRRSKKTVEDIEREARELDKRSKEEVERMIKKLREL

SEQ ID NO: 24988 - protein, 56 aa, Artificial Sequence
  Synthetic
EDKLRELEKELRDSIRESREILERLERRLEELIRRSKRILEELERELEEVIRELRR

SEQ ID NO: 24989 - protein, 56 aa, Artificial Sequence
  Synthetic
SLDDDVEKKVRELDKRNEDLDRKSEKEVEKVHRKNKRLDDESEKEVKRMIEELKKL

SEQ ID NO: 24990 - protein, 56 aa, Artificial Sequence
  Synthetic
EEELRRLAEELRESIERSRERLKELERRLRESIARSREILEELERRLKRAIEDLER

SEQ ID NO: 24991 - protein, 56 aa, Artificial Sequence
  Synthetic
SLAEDVEEKVKELNRRNKKLDDESKEMVKRAHDRNRELDERSKDRVRRVIEKLRRL

SEQ ID NO: 24992 - protein, 56 aa, Artificial Sequence
  Synthetic
KEKLEELAERLRKSIEESRDILRRLEKELRDSIKRSEEILKELTDRLRKVIKDLRD

SEQ ID NO: 24993 - protein, 56 aa, Artificial Sequence
  Synthetic
SLVEEAERRVRELIKELERLDDRSREMVKEMHERNRELIERVEKRVREVIEELRRL

SEQ ID NO: 24994 - protein, 56 aa, Artificial Sequence
  Synthetic
EDDLRKLAEDLKRVLKRSRDILRKLEEDLRRSIRELEEALRKLEEDLRRAIEELET

SEQ ID NO: 24995 - protein, 56 aa, Artificial Sequence
  Synthetic
SLKDDVEKKVEDLKKEAKDLDRESDKKVKTAHKRNEELDRKSADDVRKLIRKLEKL

SEQ ID NO: 24996 - protein, 56 aa, Artificial Sequence
  Synthetic
EEELKRLAEELERLIRDSRRILEELKRELKRSIEESRKILEDLERELEKVIRELKR

SEQ ID NO: 24997 - protein, 56 aa, Artificial Sequence
  Synthetic
SLAEEVERDVKRLDEENKRLDDRSRREVEKMDEENKKLIEDARREVREMIEKLKKL

SEQ ID NO: 24998 - protein, 56 aa, Artificial Sequence
  Synthetic
DEKLKELAKRLRDSLERSKEELKKLEEELRKSIKELEDALKKLEEDLRDVIRKLEE

SEQ ID NO: 24999 - protein, 56 aa, Artificial Sequence
  Synthetic
SLVEDVERKVRELDKRNRDLDRKSKRKVEEADKENRKLDEDSERKVRELERKATEL

SEQ ID NO: 25000 - protein, 56 aa, Artificial Sequence
  Synthetic
EESLRRLEEELRKSIKESKEILDELRKELEKSIRESKERLKELEKRLEELIRELKR

SEQ ID NO: 25001 - protein, 56 aa, Artificial Sequence
  Synthetic
KLVEDAEELVRRLDEENKRLDDDSKRRVEEANRENEKLIKEIEDEVRKMIKKLRDL

SEQ ID NO: 25002 - protein, 56 aa, Artificial Sequence
  Synthetic
EEELRKLAKRLKDSIDRSRKILEELERELRRSIDELRRALEELTDELRKVIEELRK

SEQ ID NO: 25003 - protein, 56 aa, Artificial Sequence
  Synthetic
SLAEEVEKEVKKLDEENRKLDRDSTETVKELNKKNERLDRESKRKVDEVIEKLERL

SEQ ID NO: 25004 - protein, 56 aa, Artificial Sequence
  Synthetic
KEKLDELADELKKSLDRSRRILERLEEELRRSIRRSEDILRRLKEELERVIRELRR

SEQ ID NO: 25005 - protein, 59 aa, Artificial Sequence
  Synthetic
SVDEEVEKLLKEHEERIRELIKEVEKLNREHAKRIEELIRKLKETNKRIADKIRDLKRQ

SEQ ID NO: 25006 - protein, 56 aa, Artificial Sequence
  Synthetic
EEKLRTIARRIKELNDRFKRAIDESRKHIEELNRRLEKVVEDSRRHLEELADEVRR

SEQ ID NO: 25007 - protein, 59 aa, Artificial Sequence
  Synthetic
SVLEELKRLLDEHRERLERLIRELRKLNEDHDRRIKELIERLKKLNEDIAKRIEDLKRD

SEQ ID NO: 25008 - protein, 56 aa, Artificial Sequence
  Synthetic
EDVLRKIEEDIKRLNREVEKAIRESEENIKRTNKRFKDELRKSEKHLEELVKRFRD

SEQ ID NO: 25009 - protein, 59 aa, Artificial Sequence
  Synthetic
SVLEEVTKLLKDHEDRIREIIKRLRKLNRDIDERIKRLIDEVRKKNDDIRRKIEELKRR

SEQ ID NO: 25010 - protein, 56 aa, Artificial Sequence
  Synthetic
EERLKRLREELEKLNRDVERVIKESKENLDRTVTEAKRELKRSEDNLERLAREFER

SEQ ID NO: 25011 - protein, 59 aa, Artificial Sequence
  Synthetic
TEEEILRRVERDLERLNRELERIVREVEKELKKINDDYERVLKKVKDDIDRIREELDRQ

SEQ ID NO: 25012 - protein, 56 aa, Artificial Sequence
  Synthetic
DKELEELLKRWEEDVKRIVEEVKKLLDEWRERVKRAKDENEKLLRDLEKLVEDLAR

SEQ ID NO: 25013 - protein, 59 aa, Artificial Sequence
  Synthetic
SKEDVLREVKRELKRLLDDNRRMLEEVEEAARRLNKDYNDVLKEVEEEIEKIIRELEKK

SEQ ID NO: 25014 - protein, 56 aa, Artificial Sequence
  Synthetic
EEDLKRLLDEVRRLSEKTKEDLERILRKWKEDVERAKERNRRELERLEREIKELAR

SEQ ID NO: 25015 - protein, 57 aa, Artificial Sequence
  Synthetic
ELDKIVEEVRKALREILEDYKRFSKEIHDRDKELADRLREILKDVKRAVDELIKKLS

SEQ ID NO: 25016 - protein, 60 aa, Artificial Sequence
  Synthetic
VEDVVRKLRELLERFRKKAEDLKEENKRINEENERKIREIVKTLRKLLDELREKLERTKK

SEQ ID NO: 25017 - protein, 57 aa, Artificial Sequence
  Synthetic
SLEDTLRKVDKDLKDNMRRLEETAEKVRRDIDRDEERLRRISEELHRRIEELIKRLS

SEQ ID NO: 25018 - protein, 60 aa, Artificial Sequence
  Synthetic
VEDVVRDAKRLLDEHHDLARKIVEDLRRLLEDLHRKSKKSVEDNERLLKRMEEILRETER

SEQ ID NO: 25019 - protein, 56 aa, Artificial Sequence
  Synthetic
SELEEVARRVEKLLEKHKEDLKRLLEKSEEDLRRAEEEVKRLLEEIREELDRLRKR

SEQ ID NO: 25020 - protein, 55 aa, Artificial Sequence
  Synthetic
EEIKKVRKKVEDVHEESKRLNEENRRRTKEVSDKIREIIKEIRKEIKKASDELEK

SEQ ID NO: 25021 - protein, 56 aa, Artificial Sequence
  Synthetic
DELERAVEEVEKRLREHLERIKRLLEESRELLKRHEKLLEDVLRRIRELLKRAEDR

SEQ ID NO: 25022 - protein, 55 aa, Artificial Sequence
  Synthetic
ELIKRVKERVKEAHKRSRELNERNRRETEKMHKKSRDLLRKIREEVDRMSDKLRK

SEQ ID NO: 25023 - protein, 56 aa, Artificial Sequence
  Synthetic
SEEELLRELEKKLRELRRKVDETLRDLRRRLKELEEDHRRTLEESERHLREVEKKL

SEQ ID NO: 25024 - protein, 55 aa, Artificial Sequence
  Synthetic
EKLDRRVEELIKEIEELLREVEKLVEDLIRTIKKLNDDLREDNKRLAKEMEDRAR

SEQ ID NO: 25025 - protein, 61 aa, Artificial Sequence
  Synthetic
SAVEDLEREVRKLIRDLEDLIRRLEERNKRIAEEIEKLNEELNRENKRIADEIRRIKDERG

SEQ ID NO: 25026 - protein, 56 aa, Artificial Sequence
  Synthetic
EEALERLKRELRKLAEELKKVLKRSRDHLKEVKRRHDENIKRSDDHLKRVADEARK

SEQ ID NO: 25027 - protein, 61 aa, Artificial Sequence
  Synthetic
SVAEELEKDIRRIEEEIKELLERHRELNERIVREIEDLNRKLNEMNKRVVEELRKVKRDRG

SEQ ID NO: 25028 - protein, 56 aa, Artificial Sequence
  Synthetic
DRVLKKLEKRLRELEEEAKKLLKESKEHVDEVRKRHEENIRRSEEHLRRVLEELRR

SEQ ID NO: 25029 - protein, 60 aa, Artificial Sequence
  Synthetic
SVVEELERRIEEIAREIEELNERHNRKNKEIADRIRDLNRRLNEANKKIVREIEEIKRRD

SEQ ID NO: 25030 - protein, 56 aa, Artificial Sequence
  Synthetic
SRVLDKLRKELDDLRRRHEENVDRSRKHLEEVRKEHEENIKRSERHLEEVKKEAER

SEQ ID NO: 25031 - protein, 61 aa, Artificial Sequence
  Synthetic
SVVETLEKRVRELIETLERLIERLDRENKRVAEEIKRLLDEHDKTNKEIVERIRDIKRREG

SEQ ID NO: 25032 - protein, 56 aa, Artificial Sequence
  Synthetic
SRVLRKLEEELRKLEEKLRKLLKDSEDHLREVLERAKRVLDDSRRHVDEVRREAEE

SEQ ID NO: 25033 - protein, 61 aa, Artificial Sequence
  Synthetic
SVMEDLERRIREIIKEIEKLLEDLKRENRRVAEEIERLNREHNELNKRIAEEIERIKRRRG

SEQ ID NO: 25034 - protein, 56 aa, Artificial Sequence
  Synthetic
SRVLKKIEDELKKLEDKAREVLKRSRDHLKKVEDDHRENVRRSEEHVKDVLRRFEE

SEQ ID NO: 25035 - protein, 61 aa, Artificial Sequence
  Synthetic
KVLEDLDRDIKRIIDEIRRLNEELNREIEEIKRRIKRLNEEHNERNKRLAEEARRIKDERG

SEQ ID NO: 25036 - protein, 56 aa, Artificial Sequence
  Synthetic
DEVLKRLEEKLERLREEHERNAREIRKELEKLEKEHRENVERSRRHVERVEREFET

SEQ ID NO: 25037 - protein, 61 aa, Artificial Sequence
  Synthetic
SVVERLKEIAEEIIRRIEELNKEHNKRNREIAETIERLNREHNELNKTLVREMKEIKRDKG

SEQ ID NO: 25038 - protein, 56 aa, Artificial Sequence
  Synthetic
SEVLKKIEEDLRRLLRKHEENSKESEKHVEEVEERHRRNAEDSKRHVEKVKEEVDR

SEQ ID NO: 25039 - protein, 59 aa, Artificial Sequence
  Synthetic
STEEVLKEIRDRLEELKREAKKVNDDTRERLKELEERNRRANEESKRRLEELERRVEER

SEQ ID NO: 25040 - protein, 59 aa, Artificial Sequence
  Synthetic
ERLLRELRRKLKEVEDTIRELNERLRKRIREIEEEVRESNERLRKKLREILEEIKETEK

SEQ ID NO: 25041 - protein, 59 aa, Artificial Sequence
  Synthetic
SVVEEIDKIIKRIADRVRKIIEDLERLNKEIADLLRRIIEELKRLNDRIREEVDRLRRR

SEQ ID NO: 25042 - protein, 56 aa, Artificial Sequence
  Synthetic
EKVLEDVERKLERLKREVRRVLEESRKRLKEWKDRAREVLEESKRSLEEISRRLRE

SEQ ID NO: 25043 - protein, 59 aa, Artificial Sequence
  Synthetic
SADETLRKVVEEVARKSEKLNKELEKVNKDLARAVEELIEELKDVITKIEERAKRLKDR

SEQ ID NO: 25044 - protein, 56 aa, Artificial Sequence
  Synthetic
ERVLEEIRERIERLNKRNKEVLDRSEESLRRLAEKLRRVIERVEEKLRKIEEDLKT

SEQ ID NO: 25045 - protein, 61 aa, Artificial Sequence
  Synthetic
DKEDAIRTAEKRIRDSERENEKVDEDYRRELKRSEDKNEKADKEYKRRIEELVRRLLETRG

SEQ ID NO: 25046 - protein, 56 aa, Artificial Sequence
  Synthetic
EDTLRKLVDDIEERNRRIIEELKRHLDKLREDNERVIEELKRHLEEVAREVERRRK

SEQ ID NO: 25047 - protein, 56 aa, Artificial Sequence
  Synthetic
SEKEEAEKLLREHHEKIKRLKEESKRINDENRKRIEELKRRSREINKELEEKVRRN

SEQ ID NO: 25048 - protein, 56 aa, Artificial Sequence
  Synthetic
EDTVKRIEDELKKNLDDLRRVLEKSKDDNRKLLEDLERELRESKKDARRLLEEVRK

SEQ ID NO: 25049 - protein, 56 aa, Artificial Sequence
  Synthetic
SKEEELEKLLREHHEKIKRLKEESKRINDRIRRTVEELIKESEKINRDINDTVRKN

SEQ ID NO: 25050 - protein, 56 aa, Artificial Sequence
  Synthetic
EDSVERIKRELERNLDDLRRVLKESEDDLREILRRLKEVLEESERDLERVEREVRK

SEQ ID NO: 25051 - protein, 59 aa, Artificial Sequence
  Synthetic
SELEELLERLERLIEENRRELEELIRELKEESDRTREELKRLIDRLKEKIDRVLKLKED

SEQ ID NO: 25052 - protein, 56 aa, Artificial Sequence
  Synthetic
KDVLKEARERLRKLHEETKEAKKDLDRILDENEKEVKEVKKRLEDLLKELRDRLRK

SEQ ID NO: 25053 - protein, 57 aa, Artificial Sequence
  Synthetic
SELEEVLKRIREEAERLMRRNEETLRRVKKTIEDLLRRNEKRLEDVKREADEIEKRK

SEQ ID NO: 25054 - protein, 55 aa, Artificial Sequence
  Synthetic
ERVKEEIERIEKRVREVHEEVNKRIEDLRREYRKEHKRVEDEIRRILREVREKRR

SEQ ID NO: 25055 - protein, 56 aa, Artificial Sequence
  Synthetic
SEKEEVKKESEKLSRDTKKRSDEVHKEIKRLTDETERELREVEKEIERLAEELRRQ

SEQ ID NO: 25056 - protein, 59 aa, Artificial Sequence
  Synthetic
EKVLEDELRENKKENKDLKERHDRTLEEVERTNRKVKEELRRVLRRVEESVREVAERAT

SEQ ID NO: 25057 - protein, 61 aa, Artificial Sequence
  Synthetic
SKEETIEKRVEELKRENDEKVERIKREIEDLIRRNKELLERIKKEVRELLKELKDRAEKKG

SEQ ID NO: 25058 - protein, 60 aa, Artificial Sequence
  Synthetic
DRELDKALEDIERRIREHNKELDDELRKVREDSRRHLEKLKRELEEIREEARRITEELKK

SEQ ID NO: 25059 - protein, 60 aa, Artificial Sequence
  Synthetic
EEKELLDKLKEDADRIKKELEDTLRELKKKHDDVNDRNRKHHEEVRRRAEKIKDKLRRDK

SEQ ID NO: 25060 - protein, 55 aa, Artificial Sequence
  Synthetic
EEVRKRLDDLEREIKKIIDEIDERHRRLTEENKRSLDRDREELEKLKEEIKRTAD

SEQ ID NO: 25061 - protein, 58 aa, Artificial Sequence
  Synthetic
DEAEKIKEDAKRLIEENDEIVRRIEEEMKKSHKENREILKKIKEDVDRSHEDLRRRSG

SEQ ID NO: 25062 - protein, 56 aa, Artificial Sequence
  Synthetic
EEVLKDLRRRSEEHKKKLEDDLRRHEKKSRDHKEKLKELLERHKRRVEEVRKRETK

SEQ ID NO: 25063 - protein, 60 aa, Artificial Sequence
  Synthetic
SREELMEELERLLERLIREIEKASRENEERVKELKREIEESTKRNKETAKKLLDELTRSN

SEQ ID NO: 25064 - protein, 55 aa, Artificial Sequence
  Synthetic
DELRKTLEDIRRRVEEAKERHRRILKTIKERSEKLTREHRKVNEDIEEKLRRAKK

SEQ ID NO: 25065 - protein, 61 aa, Artificial Sequence
  Synthetic
SERETVERVLDRLREELEKIKKELEDVNRESKKEVERLLRRNEELHKKVEKDARDILRKKG

SEQ ID NO: 25066 - protein, 55 aa, Artificial Sequence
  Synthetic
EELKKTLDKILEDAKEEVREDRKRNEKLNRELEERSRRNEEDLRRLLKKLKDEAD

SEQ ID NO: 25067 - protein, 60 aa, Artificial Sequence
  Synthetic
DEKETIEERRKEIEKIIKDLEKNVRDHEKRIEEIIKEIRDNTEKLKKEAEDLLRRIRKEG

SEQ ID NO: 25068 - protein, 55 aa, Artificial Sequence
  Synthetic
RELEETLRRLDERTKKVIKEAEDVHRRLRERLRKIEKEHEDTLRELKKRLDDEAR

SEQ ID NO: 25069 - protein, 61 aa, Artificial Sequence
  Synthetic
SAEDRLREADERYERELRRLKRELEEVIKEYRKAIEELKKELEDVLRRFREELKRLEEEKG

SEQ ID NO: 25070 - protein, 58 aa, Artificial Sequence
  Synthetic
EEVREIIERLKESLKRNEEDVRRLIRRLKEELKRNKEEVERLKKELEDILRELADRAR

SEQ ID NO: 25071 - protein, 61 aa, Artificial Sequence
  Synthetic
DAERELKKVEDEYEKRIRDLERDLRRVLEEYERAIEELKKELDDVLREAEKALEDLLRKKG

SEQ ID NO: 25072 - protein, 59 aa, Artificial Sequence
  Synthetic
GEEVKEIKKELEESLKRNEDKVRELKRRLEELLKENEKKVRELIRRLEEELRRLAERTR

SEQ ID NO: 25073 - protein, 61 aa, Artificial Sequence
  Synthetic
SAEEELKKVDDDYEREIRRLEKELEDVLRDVDRDHRRLEEELKKVIRDIEEALKDLLRKKG

SEQ ID NO: 25074 - protein, 58 aa, Artificial Sequence
  Synthetic
EEVREIKERLRKSLEDNERKVKEIIDRIREDLKENRDRVRKLIKDLDDELKELAKKAK

SEQ ID NO: 25075 - protein, 60 aa, Artificial Sequence
  Synthetic
DEEREIEERIKRILEDLKRNLEDNERKIRKIVKDNRENNKRNEDKIRRILEELKRAKEEG

SEQ ID NO: 25076 - protein, 55 aa, Artificial Sequence
  Synthetic
ERVRKLEKDLEKALEEIRRRYEELLKRLKRENEESKKTYDKLIEELRRAAREIKR

SEQ ID NO: 25077 - protein, 60 aa, Artificial Sequence
  Synthetic
DEKERIEEEIRRILRELEELTERNEKKIRDIVREIRKNSEENRRKIEKILEELEELKKEG

SEQ ID NO: 25078 - protein, 55 aa, Artificial Sequence
  Synthetic
EEVEELLRRLRKRLEDLERRNKELLEELKERLERAEKRNRDLLKELEDALERIRK

SEQ ID NO: 25079 - protein, 60 aa, Artificial Sequence
  Synthetic
DEEEEIEKKLRKNIRDAEEKTKRNKERAEDNLRKARENSKRNEEDIRRKLKRLKELKEEG

SEQ ID NO: 25080 - protein, 55 aa, Artificial Sequence
  Synthetic
ERVDRLKKELERMHRKLDKENRDIEKRVREEHRRLTERNRKLLEDLEEALERIRT

SEQ ID NO: 25081 - protein, 60 aa, Artificial Sequence
  Synthetic
SEEEEIERRLRDNIRKAEENTRRNKEKIDRILEEMRENSKENKRRIEEILDELRKLKEEG

SEQ ID NO: 25082 - protein, 55 aa, Artificial Sequence
  Synthetic
ERVDELKEKVERDHERLRKENEDLLRELRKRLDELRRENEKLLRELEEALDRIRK

SEQ ID NO: 25083 - protein, 60 aa, Artificial Sequence
  Synthetic
SELERVREEIRRLERENEETLREVEEKIRKLLEENREALERVEERVRRVKEELKEVRRRQ

SEQ ID NO: 25084 - protein, 59 aa, Artificial Sequence
  Synthetic
DDVRRDIERLDEEYERRHKDVNRKLKRLDDEYEKATRDVRRRLEELTKELRDEAEKVRK

SEQ ID NO: 25085 - protein, 56 aa, Artificial Sequence
  Synthetic
SERERVDRLEERYEEESRRVEEELRRLLKRYEDFHRELRKRLEDIVREVRKTLKEL

SEQ ID NO: 25086 - protein, 56 aa, Artificial Sequence
  Synthetic
TREIEKRVERLLEENEERLRRVRKEIKKALDENREILKEVEDRARKILEELRRKAK

SEQ ID NO: 25087 - protein, 59 aa, Artificial Sequence
  Synthetic
SELEEVKRRVEEIKKKLKEDLDDHKRRNEKHIKELEDRLEEHRREIEELVRKLEELKRR

SEQ ID NO: 25088 - protein, 59 aa, Artificial Sequence
  Synthetic
EEVRKALKELEDDLRRVLEEIKRAHKKSKEDNKRVLDDLTEKHKRSEEELRDVLRDLER

SEQ ID NO: 25089 - protein, 60 aa, Artificial Sequence
  Synthetic
SSLEELEKRNRERIEELERTLRELEERSRELNERLKRELDEHKKRIDELLEELRRLKEEN

SEQ ID NO: 25090 - protein, 59 aa, Artificial Sequence
  Synthetic
EEVRRALEELEKSHDEVRERIKRRLDESKERNKRALEKIKRDHEESEERLRRALDRTRK

SEQ ID NO: 25091 - protein, 60 aa, Artificial Sequence
  Synthetic
SSLEEVKKENEKLIKELKEELDKIRKENEEHIEKLERELERVKREAEKIKKKLEELKREN

SEQ ID NO: 25092 - protein, 59 aa, Artificial Sequence
  Synthetic
KEVKDALEELKRSHRKVAKEIKEAVKESRKKNEEVAKKIKKALDELKRELDEALKEAKR

SEQ ID NO: 25093 - protein, 60 aa, Artificial Sequence
  Synthetic
DEVETLEERVRRLKKELRDELKRNEDKVRKLKRELEESLKENAKKVEEVERDLERVKREG

SEQ ID NO: 25094 - protein, 59 aa, Artificial Sequence
  Synthetic
DEVRREIERLKRELERVIREYREAIERLKRDLKRAIDKYREDIKRLEEKLRRVDKELEK

SEQ ID NO: 25095 - protein, 59 aa, Artificial Sequence
  Synthetic
SEVERVREENKRSEEKLKKLLEDSRRNLEENRKRLEELLRKSEENLERLKRELDELRKQ

SEQ ID NO: 25096 - protein, 55 aa, Artificial Sequence
  Synthetic
EDLRRNRETNEELRDRVRRTHEKLEREAEKVHEDVRRRHKELEDEVREVLKELRR

SEQ ID NO: 25097 - protein, 56 aa, Artificial Sequence
  Synthetic
SDEELIKRIREELERLLKELRDTIKEVEDRNRESLEDLDRVHKRIKEEIERLEKDL

SEQ ID NO: 25098 - protein, 60 aa, Artificial Sequence
  Synthetic
SEELAKKLKDELRRAKDKVEEIKKRIRDTLEDNRKKAEELKRKNEEDLRRFEKKAEDVRK

SEQ ID NO: 25099 - protein, 56 aa, Artificial Sequence
  Synthetic
SKEDKAREDVKRTIEELKDRNRKLNDKIRKTIEDLERRNEELNKENKDLVDELRDG

SEQ ID NO: 25100 - protein, 56 aa, Artificial Sequence
  Synthetic
EEVLRELREEIEKLEKEHRDNVRKLERDLDRLRKKHEDNKERLERHTRRVEEEKRR

SEQ ID NO: 25101 - protein, 60 aa, Artificial Sequence
  Synthetic
STEEDVRKIVDDARRNLEENKRRIEKIVKELEDKLRENEKKIRKILEDIRRLLEKFKRDD

SEQ ID NO: 25102 - protein, 56 aa, Artificial Sequence
  Synthetic
EDIMRDLRRRLERIAREYKRLLDELKKRLDDIKKTYEDLLRRLREEIERAEEKARR

SEQ ID NO: 25103 - protein, 60 aa, Artificial Sequence
  Synthetic
DEEEEVRKILEEIKKELDDNERRIRKNIRDAEETLRENEKRIRDILKEIEDLLKELKDRD

SEQ ID NO: 25104 - protein, 56 aa, Artificial Sequence
  Synthetic
EDILEKLRRDIERADEEYKRLEEELRRKHDEIRKTYEKLLKELEEAIERVEREAEK

SEQ ID NO: 25105 - protein, 55 aa, Artificial Sequence
  Synthetic
SSKDLLEELRRTVEEVRKRSDDLSRESEEATRRVRKEHDRINKEVEDELRRVRED

SEQ ID NO: 25106 - protein, 56 aa, Artificial Sequence
  Synthetic
EDIVREMRKRLEELLRENEKRNEELLRRLKELLDRSRERVREIEERLRELLEEVRR

SEQ ID NO: 25107 - protein, 57 aa, Artificial Sequence
  Synthetic
DAEKLKRDYEEKSRRVKETLDDLVRRYREEHRRVNEELRKLLEDLKKTVEDVEKEEG

SEQ ID NO: 25108 - protein, 60 aa, Artificial Sequence
  Synthetic
SERLEREIRKLEEENKRTLERVKEKIERLLEENEKVLKEVRDKVKTIKDRLRKLVEEIRR

SEQ ID NO: 25109 - protein, 60 aa, Artificial Sequence
  Synthetic
SVEDEVRKIKRRLEEALERSEKKVRDMVRRNKEFLERAKRRVEEVVKENERALEEVKRRG

SEQ ID NO: 25110 - protein, 56 aa, Artificial Sequence
  Synthetic
EEILRRVRKTVKDVEDTLKELNDRLEKIHREVKKELDRLLKELDDRHRKVAEDLKK

SEQ ID NO: 25111 - protein, 59 aa, Artificial Sequence
  Synthetic
SVEELLRKLEEVLRKIREENERSLKELRDRAREIVKRNRETNRELEEVIKELEKRLSGA

SEQ ID NO: 25112 - protein, 59 aa, Artificial Sequence; identical to SEQ ID NO: 14436
  Synthetic

SEQ ID NO: 25113 - protein, 57 aa, Artificial Sequence
  Synthetic
DEVEKVLEEIKRALDDLRKKVEESKREIKEALKAVEKHTRDSDTANKRTLAEIERGV

SEQ ID NO: 25114 - protein, 55 aa, Artificial Sequence
  Synthetic
ERVVEEVRRVLEELRRRLEKVTEDSRRAIERLAREDARVSKKSIDVNKKLDDDVR

SEQ ID NO: 25115 - protein, 60 aa, Artificial Sequence
  Synthetic
DAEELVRELEERIKRSHERLEELLREVKRLIERSHEELKRLNEEVLRELDRVLDEVAKRG

SEQ ID NO: 25116 - protein, 55 aa, Artificial Sequence
  Synthetic
KDSARELERIVKENAELAERVFREVEKIVRENTKLAEDSVRELKRLVEELKKRAK

SEQ ID NO: 25117 - protein, 58 aa, Artificial Sequence
  Synthetic
SAADEVVERMKELVATVKRENDEVVKELKKLVKELEDDNRRVVEESKKSVEDLARRVG

SEQ ID NO: 25118 - protein, 56 aa, Artificial Sequence
  Synthetic
EDLVREVEKRVRDIVEESRKLAEETRKAVEDIIEKSKRIAEDTLEKNKEMVERLER

SEQ ID NO: 25119 - protein, 55 aa, Artificial Sequence
  Synthetic
SESDEVIRDLARLLDELARHVDDSVRRMDEVVKRSTREADELAKRLDELVKEVEK

SEQ ID NO: 25120 - protein, 56 aa, Artificial Sequence; identical to SEQ ID NO: 15500
  Synthetic

SEQ ID NO: 25121 - protein, 55 aa, Artificial Sequence; identical to SEQ ID NO: 25119
  Synthetic

SEQ ID NO: 25122 - protein, 56 aa, Artificial Sequence; identical to SEQ ID NO: 15500
  Synthetic

SEQ ID NO: 25123 - protein, 55 aa, Artificial Sequence
  Synthetic
SESDDVIRKLRELLEELRTHVEKSIRDLRKILEDSTRHAKRSIEELERLLEEVRK

SEQ ID NO: 25124 - protein, 56 aa, Artificial Sequence; identical to SEQ ID NO: 15502
  Synthetic

SEQ ID NO: 25125 - protein, 55 aa, Artificial Sequence; identical to SEQ ID NO: 25123
  Synthetic

SEQ ID NO: 25126 - protein, 56 aa, Artificial Sequence; identical to SEQ ID NO: 15502
  Synthetic

SEQ ID NO: 25127 - protein, 60 aa, Artificial Sequence
  Synthetic
DREREVKKRLDEVRERIERLLRRVEEESRRVAEEIRRLIEEVRRRNKKVTEEIRELLKGL

SEQ ID NO: 25128 - protein, 55 aa, Artificial Sequence
  Synthetic
EELREELKKLERKIEKVAKEIHDHDKEVTERLEDLLRRITEHARKSDREIEETAR

SEQ ID NO: 25129 - protein, 60 aa, Artificial Sequence; identical to SEQ ID NO: 25127
  Synthetic

SEQ ID NO: 25130 - protein, 55 aa, Artificial Sequence; identical to SEQ ID NO: 25128
  Synthetic

SEQ ID NO: 25131 - protein, 57 aa, Artificial Sequence
  Synthetic
SEVDEAVKNNEEDAKESRRVVEEAVKRDEDIARDIERAAREVVERDKEIVDEVRRGV

SEQ ID NO: 25132 - protein, 60 aa, Artificial Sequence
  Synthetic
SKETKDLLDENSKRSNEISREVKKDLERTVRENKKIVDEVAKALEDTVDKNRRIVEEVTT

SEQ ID NO: 25133 - protein, 60 aa, Artificial Sequence
  Synthetic
SEAEELLKRLEDRAEEILRRLEEILRTSRKLAEDVLRELEKLLRESERRIREVLEELRGI

SEQ ID NO: 25134 - protein, 59 aa, Artificial Sequence
  Synthetic
KEVVDEIKRIVDEVRERLKRIVDENAKIVEDARRALEKIVKENEEILRRLKKELRELRK

SEQ ID NO: 25135 - protein, 57 aa, Artificial Sequence
  Synthetic
SRAETVLKEVTDKIKKLADSSDELLRRNKENIDELKKSSEELLRRLTKAIEEIEKGS

SEQ ID NO: 25136 - protein, 56 aa, Artificial Sequence; identical to SEQ ID NO: 16914
  Synthetic

SEQ ID NO: 25137 - protein, 57 aa, Artificial Sequence; identical to SEQ ID NO: 25135
  Synthetic

SEQ ID NO: 25138 - protein, 56 aa, Artificial Sequence; identical to SEQ ID NO: 16914
  Synthetic

SEQ ID NO: 25139 - protein, 57 aa, Artificial Sequence
  Synthetic
DEVRELLERNRRLLEEIKKTVKDLIRANEELLKRIEDDAKRLIDRNEELLDELEKGL

SEQ ID NO: 25140 - protein, 59 aa, Artificial Sequence
  Synthetic
SEELEELRRVVEESDETIKRLLEEAKESVDRSLDRIRKLLEDVRRSVERSAKRIDEKRK

SEQ ID NO: 25141 - protein, 60 aa, Artificial Sequence
  Synthetic
STEEVLDEIRKLHKTLTEDIKRVLREIEELHRRTIEENKEVLDKIAEDYKRVIDDVRTKD

SEQ ID NO: 25142 - protein, 56 aa, Artificial Sequence; identical to SEQ ID NO: 18130
  Synthetic

SEQ ID NO: 25143 - protein, 60 aa, Artificial Sequence; identical to SEQ ID NO: 19323
  Synthetic

SEQ ID NO: 25144 - protein, 62 aa, Artificial Sequence
  Synthetic
EDSERLVREVEDLVRRLVRRSEKSNEEVKRTVEELVRRMEESNDRVRDLVRRLVEELKRAVD

SEQ ID NO: 25145 - protein, 59 aa, Artificial Sequence
  Synthetic
SEAEKAKETIDRLADRVRKLLEEIKRSLDDSRRKSKETVEENEKTLDRMRKEVDAAKRG

SEQ ID NO: 25146 - protein, 56 aa, Artificial Sequence; identical to SEQ ID NO: 19650
  Synthetic

SEQ ID NO: 25147 - protein, 59 aa, Artificial Sequence; identical to SEQ ID NO: 25145
  Synthetic

SEQ ID NO: 25148 - protein, 56 aa, Artificial Sequence; identical to SEQ ID NO: 19650
  Synthetic

SEQ ID NO: 25149 - protein, 56 aa, Artificial Sequence
  Synthetic
SEVEELIKRLAKVLKELVDKVRKVIEDTKELLERLKRRSEDHIRKLREVLKEAKDQ

SEQ ID NO: 25150 - protein, 59 aa, Artificial Sequence
  Synthetic
EELDRRIEKVLKEIEEKIREVIKEWERVHREVEELLKRLIDENRKVLDEIRKLLEEKSK

SEQ ID NO: 25151 - protein, 56 aa, Artificial Sequence; identical to SEQ ID NO: 25149
  Synthetic

SEQ ID NO: 25152 - protein, 59 aa, Artificial Sequence; identical to SEQ ID NO: 25150
  Synthetic

SEQ ID NO: 25153 - protein, 59 aa, Artificial Sequence; identical to SEQ ID NO: 19801
  Synthetic

SEQ ID NO: 25154 - protein, 59 aa, Artificial Sequence
  Synthetic
DKALEEAKRVLAENNEVIKDIKRALDELLKELEKSVRESEERLRRLLEEVKRVIEEVAT

SEQ ID NO: 25155 - protein, 59 aa, Artificial Sequence
  Synthetic
SEAERLEARARELLRANEELMDDLRAKAEELLKRNDRLVKEIEKKVREVLAAIEELKRR

SEQ ID NO: 25156 - protein, 59 aa, Artificial Sequence
  Synthetic
KRLEELLRRLNEEHKRISDELRKLLDEALEAHRELSRRLEEELERLLREIERLVEEVTR

SEQ ID NO: 25157 - protein, 56 aa, Artificial Sequence
  Synthetic
SVDEVLKEIEDALRRLKEEVERVLKENEDELRRLEEEVRRVLKEDEELLESLKRGV

SEQ ID NO: 25158 - protein, 59 aa, Artificial Sequence
  Synthetic
EKAIRDVAKEIRDRLKELEEEIEEVTRRNLKLLADVEEEIRRVHEKTRRLLETVLRRAT

SEQ ID NO: 25159 - protein, 60 aa, Artificial Sequence
  Synthetic
DDLERAREEVADLIRKHEEKTRRILEESRRLNERHRELSARILDEIRKLAERIEELIKRE

SEQ ID NO: 25160 - protein, 59 aa, Artificial Sequence; identical to SEQ ID NO: 20434
  Synthetic

SEQ ID NO: 25161 - protein, 57 aa, Artificial Sequence
  Synthetic
KEVEDAVKELEDLLRANEDKTRSIVEDMRASNKDLEDHSRASEEEVRKLLDDLRRAG

SEQ ID NO: 25162 - protein, 56 aa, Artificial Sequence
  Synthetic
IKTLLDRVRKLAEEDAERLDRLRRESEELNERVRRVDKKLLEEIRRKAKKVEDDTR

SEQ ID NO: 25163 - protein, 57 aa, Artificial Sequence; identical to SEQ ID NO: 25161
  Synthetic

SEQ ID NO: 25164 - protein, 56 aa, Artificial Sequence; identical to SEQ ID NO: 25162
  Synthetic

SEQ ID NO: 25165 - protein, 56 aa, Artificial Sequence
  Synthetic
DEEEDLERAIKKLLDENRELLKRIAEELRRLLEELRRLTEESADRLRRLLKELKDR

SEQ ID NO: 25166 - protein, 56 aa, Artificial Sequence
  Synthetic
AETLLRELEKLSRDNKELLKKIEKEIRDLIKEDKERNIELSERLRKLVEELKKKAT

SEQ ID NO: 25167 - protein, 56 aa, Artificial Sequence; identical to SEQ ID NO: 25165
  Synthetic

SEQ ID NO: 25168 - protein, 56 aa, Artificial Sequence; identical to SEQ ID NO: 25166
  Synthetic

SEQ ID NO: 25169 - protein, 57 aa, Artificial Sequence
  Synthetic
DDAERILREMERLLEENKEISDEIAKELKRLLDENRKLSEDVVKALEDLLRDLERRS

SEQ ID NO: 25170 - protein, 59 aa, Artificial Sequence
  Synthetic
KDTLRELARSIRKLSAENKERLKELLRELKKLSDENKERIKKLLSDAEKIIEDVARRAK

SEQ ID NO: 25171 - protein, 60 aa, Artificial Sequence
  Synthetic
SSEERLRAVIEDLKRLAEESRKRHKELIDELAKAVERIERRHKKLLDEIKAVVDDIRRGV

SEQ ID NO: 25172 - protein, 56 aa, Artificial Sequence
  Synthetic
ADTIIEEVKRVLEELARSTEEVEKRVRDAIEELERSSEELARRIKEVLKRLEEETR

SEQ ID NO: 25173 - protein, 60 aa, Artificial Sequence
  Synthetic
DEARELVKELEDLIREITKTVRRLLEESEELIKRIDDAVDDLRRADEDLNREIKEEIEKG

SEQ ID NO: 25174 - protein, 56 aa, Artificial Sequence
  Synthetic
ERILRELEERVKELEKEAREILKRSEDETDKLREKAERILEDLERANRRTMDEARR

SEQ ID NO: 25175 - protein, 60 aa, Artificial Sequence; identical to SEQ ID NO: 25173
  Synthetic

SEQ ID NO: 25176 - protein, 56 aa, Artificial Sequence; identical to SEQ ID NO: 25174
  Synthetic

SEQ ID NO: 25177 - protein, 59 aa, Artificial Sequence
  Synthetic
DEIRKVVKEITDLLKASNDKNRKVVEEIRDLLRKSKKLADELVERLRALVEDLRRRIDK

SEQ ID NO: 25178 - protein, 59 aa, Artificial Sequence
  Synthetic
SEDLKRVEERAREVSRRNEESMRRVKEDADRVSEANKEVLDRVREEVKRLIEEVRETLR

SEQ ID NO: 25179 - protein, 59 aa, Artificial Sequence; identical to SEQ ID NO: 25177
  Synthetic

SEQ ID NO: 25180 - protein, 59 aa, Artificial Sequence; identical to SEQ ID NO: 25178
  Synthetic

SEQ ID NO: 25181 - protein, 57 aa, Artificial Sequence
  Synthetic
STAETVEKKVEEVIRENEKSMRESEEKVDRSTKRIEDVLRRLEETIRKTSDDIAKGV

SEQ ID NO: 25182 - protein, 59 aa, Artificial Sequence
  Synthetic
REDATRVIEEAKRILDEARKLNEETIRRSEELVRRIERVIEEIIKRSEKLLEDVARESK

SEQ ID NO: 25183 - protein, 57 aa, Artificial Sequence; identical to SEQ ID NO: 25181
  Synthetic

SEQ ID NO: 25184 - protein, 59 aa, Artificial Sequence; identical to SEQ ID NO: 25182
  Synthetic

SEQ ID NO: 25185 - protein, 57 aa, Artificial Sequence
  Synthetic
STAETVAEEVERVLKHSDDLIKEVEDVNRRVEEEIKRVIRELEEENERLVAEVRKGV

SEQ ID NO: 25186 - protein, 59 aa, Artificial Sequence
  Synthetic
EEAAREIIKRLREVNKRTKEKLDELIKHSEEVLERVKRLIDELRKHSEEVLEDLRRRAK

SEQ ID NO: 25187 - protein, 57 aa, Artificial Sequence; identical to SEQ ID NO: 25185
  Synthetic

SEQ ID NO: 25188 - protein, 59 aa, Artificial Sequence; identical to SEQ ID NO: 25186
  Synthetic

SEQ ID NO: 25189 - protein, 59 aa, Artificial Sequence; identical to SEQ ID NO: 21345
  Synthetic

SEQ ID NO: 25190 - protein, 56 aa, Artificial Sequence
  Synthetic
AETIERVVRELLEENKEVLRKTEEAVKRSTETNKRLLEASKEVADRLRERIKEAAK

SEQ ID NO: 25191 - protein, 61 aa, Artificial Sequence
  Synthetic
SRVEEIIEDLRRLLEEIRKENEDSIRRSKELLDRVKEINDTIIAELERLLKDIEKEVREKG

SEQ ID NO: 25192 - protein, 59 aa, Artificial Sequence
  Synthetic
EDKARKVAEVAEKVLRDIDKLDRESKEAFRATNEEIAKLDEDTARVAERVKKAIEDLAK

SEQ ID NO: 25193 - protein, 61 aa, Artificial Sequence; identical to SEQ ID NO: 25191
  Synthetic

SEQ ID NO: 25194 - protein, 59 aa, Artificial Sequence; identical to SEQ ID NO: 25192
  Synthetic

SEQ ID NO: 25195 - protein, 61 aa, Artificial Sequence
  Synthetic
SEVDEIIKELERLLAEIARENERIIRESRKLADEVRKRNEDAIRKLEELVARLADAVRRKG

SEQ ID NO: 25196 - protein, 59 aa, Artificial Sequence
  Synthetic
KDEVTKVKKVADDVLAEIKKLDDETRRVIEDTNKKIADLDKATRDVVRKVLEEVKKLEK

SEQ ID NO: 25197 - protein, 59 aa, Artificial Sequence; identical to SEQ ID NO: 21407
  Synthetic

SEQ ID NO: 25198 - protein, 59 aa, Artificial Sequence
  Synthetic
SEKLKELRDVIAEVAKRIDELDEYTRESIRRAKKEIERLNRETKKVIEEVVKRIEEERK

SEQ ID NO: 25199 - protein, 59 aa, Artificial Sequence; identical to SEQ ID NO: 21407
  Synthetic

SEQ ID NO: 25200 - protein, 59 aa, Artificial Sequence; identical to SEQ ID NO: 25198
  Synthetic

SEQ ID NO: 25201 - protein, 59 aa, Artificial Sequence
  Synthetic
DAVEEAEKLIRKVIADSEKLLRDLADLNAKSIRRSEKLVEDDRRANEDVIRKLEELRRN

SEQ ID NO: 25202 - protein, 59 aa, Artificial Sequence
  Synthetic
EELLRRIKKLLDEIKKAIEDSSREIKRLLEESERVMKRSSEDIKRTLDDTRRVVEEVRR

SEQ ID NO: 25203 - protein, 59 aa, Artificial Sequence; identical to SEQ ID NO: 25201
  Synthetic

SEQ ID NO: 25204 - protein, 59 aa, Artificial Sequence; identical to SEQ ID NO: 25202
  Synthetic

SEQ ID NO: 25205 - protein, 56 aa, Artificial Sequence
  Synthetic
SSDEVLKEIEEIIRRLEAEVRRVNAEVNASTEDLAREVEEVLRATNELIEELERRV

SEQ ID NO: 25206 - protein, 59 aa, Artificial Sequence
  Synthetic
EEALSKAIKDVRDIVKKVKDELKEWRDRNKELVDRLSEELKEWLKDVERVLKELTDKDR

SEQ ID NO: 25207 - protein, 57 aa, Artificial Sequence
  Synthetic
SEADDVLKKLAETVKRIIERLKKLTDDSRRLVEEVHRRNDKLSKESAEAVRKAEERG

SEQ ID NO: 25208 - protein, 55 aa, Artificial Sequence
  Synthetic
EELSAEVKKLLDEVRKALARHKDENDKLLKEIEDSLRRHKEENDRLLEKLKESTR

SEQ ID NO: 25209 - protein, 57 aa, Artificial Sequence; identical to SEQ ID NO: 25207
  Synthetic

SEQ ID NO: 25210 - protein, 55 aa, Artificial Sequence; identical to SEQ ID NO: 25208
  Synthetic

SEQ ID NO: 25211 - protein, 59 aa, Artificial Sequence; identical to SEQ ID NO: 22001
  Synthetic

SEQ ID NO: 25212 - protein, 59 aa, Artificial Sequence
  Synthetic
EDKVERVVREVEKLHEEDRKRLEESTRSVRKLLEELKRELEKSTRSVKALVDELRERVR

SEQ ID NO: 25213 - protein, 59 aa, Artificial Sequence; identical to SEQ ID NO: 22001
  Synthetic

SEQ ID NO: 25214 - protein, 59 aa, Artificial Sequence; identical to SEQ ID NO: 25212
  Synthetic

SEQ ID NO: 25215 - protein, 59 aa, Artificial Sequence
  Synthetic
SEAEEIRRRLEEISRRSVEHLRKVLEEIKRISERSKRHLDRVLEENARRLEELAELLKR

SEQ ID NO: 25216 - protein, 56 aa, Artificial Sequence
  Synthetic
EEVLRELEELLKESEERIKRIEEEIKKIIDKSREDIKRVLEEIERLNAKAADDLRK

SEQ ID NO: 25217 - protein, 60 aa, Artificial Sequence
  Synthetic
SEVDDVLRRLEELIKTLEDINAKSLEDIKKLIDDLAKILEDALRKHEKLIRELREAKKGI

SEQ ID NO: 25218 - protein, 56 aa, Artificial Sequence
  Synthetic
KEALDRMREEIRRLEEESRKSDETIERLIRELRRRVEEVLKTSTDLIRELEEEVKK

SEQ ID NO: 25219 - protein, 60 aa, Artificial Sequence; identical to SEQ ID NO: 25217
  Synthetic

SEQ ID NO: 25220 - protein, 56 aa, Artificial Sequence; identical to SEQ ID NO: 25218
  Synthetic

SEQ ID NO: 25221 - protein, 59 aa, Artificial Sequence
  Synthetic
SDAEELLKRVADLLKASLESLEKILRDSKELMDRWRKKLEDLLRESEELVDRAEKILRR

SEQ ID NO: 25222 - protein, 55 aa, Artificial Sequence
  Synthetic
ERVREELKKLLTRVEEEHRKVLETDKKILKEAHKESKEVNDRDRELLERLEESVR

SEQ ID NO: 25223 - protein, 57 aa, Artificial Sequence
  Synthetic
DAAERAKEKLDKILEDLRDVVRASKENLDRLHAENAETLERSKANLDRLLEKVKKDG

SEQ ID NO: 25224 - protein, 59 aa, Artificial Sequence
  Synthetic
ERDIERILRELEAVLKKLTDESERLNREVERVSRDTKKKSKELNEELKAVLDEVKRKAD

SEQ ID NO: 25225 - protein, 60 aa, Artificial Sequence
  Synthetic
SEIETVRREIEKILDDLRRTVKRIEDEVRKIHEDLRRSLEDSKRNIEEILKDLERAARRD

SEQ ID NO: 25226 - protein, 59 aa, Artificial Sequence
  Synthetic
KEDIDKLLKELRDLVEKIKKDLKELLERYEEIVRRIKELLKDLNREAEEVVRRLKEELR

SEQ ID NO: 25227 - protein, 57 aa, Artificial Sequence
  Synthetic
KELEDVIEEVKKLLKTVNEESRRVAEEVRKLIREVSEELTEVIRRVERLVEEVAKGV

SEQ ID NO: 25228 - protein, 56 aa, Artificial Sequence
  Synthetic
AETVLRSAEDIVAKNRKLAEEVLRRVKKIVEENRKIASEVLDDVRKLVEDVLARAS

SEQ ID NO: 25229 - protein, 60 aa, Artificial Sequence
  Synthetic
SKLEEVEKAVRKVIEDSRRVNEEVNRRSEEVVRELEKVHREVNDASRRVVEKARRVLKGS

SEQ ID NO: 25230 - protein, 58 aa, Artificial Sequence; identical to SEQ ID NO: 22670
  Synthetic

SEQ ID NO: 25231 - protein, 60 aa, Artificial Sequence; identical to SEQ ID NO: 25229
  Synthetic

SEQ ID NO: 25232 - protein, 58 aa, Artificial Sequence; identical to SEQ ID NO: 22670
  Synthetic

SEQ ID NO: 25233 - protein, 56 aa, Artificial Sequence
  Synthetic
SAEEVKEELKRIATKLKEEIKENIRRLEESVEKIAKELAENIKRLEDILRDVKRGL

SEQ ID NO: 25234 - protein, 56 aa, Artificial Sequence
  Synthetic
GEELVERLRRVVEEVRERLKDSSRELRKINEDSRKAVEDSSAEVAKVVEELERRDT

SEQ ID NO: 25235 - protein, 57 aa, Artificial Sequence
  Synthetic
SEIERVKKRLEELLAEVEESTRRLEERLKRLLEEAKRSSEEVEKELRRLLEAVRRGL

SEQ ID NO: 25236 - protein, 56 aa, Artificial Sequence
  Synthetic
ADDVLARVEELAKRAHDENERLIREVEELVRAHNKRNKELVDEVKRLVEKVIEEER

SEQ ID NO: 25237 - protein, 57 aa, Artificial Sequence; identical to SEQ ID NO: 25235
  Synthetic

SEQ ID NO: 25238 - protein, 56 aa, Artificial Sequence; identical to SEQ ID NO: 25236
  Synthetic

SEQ ID NO: 25239 - protein, 60 aa, Artificial Sequence
  Synthetic
SDVDRVLEEIRKLLEDLKRHSEKVSEENEDLLRANTELNKRVSEDNERLLEELKRLRERG

SEQ ID NO: 25240 - protein, 59 aa, Artificial Sequence
  Synthetic
EEAKKKLDEVLERAKRTIDRLLETSDRSLEKVEADLRRLNEELDRSLERAERTIRELAK

SEQ ID NO: 25241 - protein, 60 aa, Artificial Sequence; identical to SEQ ID NO: 25239
  Synthetic

SEQ ID NO: 25242 - protein, 59 aa, Artificial Sequence; identical to SEQ ID NO: 25240
  Synthetic

SEQ ID NO: 25243 - protein, 55 aa, Artificial Sequence
  Synthetic
STEDVLRKIKEDVKRVIDDNRRILDEVRRTSKRVLDDLRANLKHIAEEVERVLRG

SEQ ID NO: 25244 - protein, 56 aa, Artificial Sequence
  Synthetic
SKELLEKAKAVVDEIKRLAEESLKRLEDLSRDHKRRAKELNDEIAKVVDELAKRAT

SEQ ID NO: 25245 - protein, 60 aa, Artificial Sequence
  Synthetic
SAEELLREVAELVKRVDEDLRRLLEEVRASNEEVIRRLEEILKRIEEENRKVVEELRRGG

SEQ ID NO: 25246 - protein, 59 aa, Artificial Sequence
  Synthetic
EETVKRLLDELRELLERLKRTIEELLKRNRDLLADAEEKARRLLEENRKLLKAARDTAT

SEQ ID NO: 25247 - protein, 59 aa, Artificial Sequence
  Synthetic
SEDEDLDRVAEKLAREHKKSVEEIKRVLKSADEESKKLVRDTERVIEEIKREVEEARRG

SEQ ID NO: 25248 - protein, 55 aa, Artificial Sequence
  Synthetic
EEVLKKLAEIVRRVKEENRKVNEEVEKRLRELEEENKKVIEDLKSTVEELVERLR

SEQ ID NO: 25249 - protein, 59 aa, Artificial Sequence; identical to SEQ ID NO: 25247
  Synthetic

SEQ ID NO: 25250 - protein, 55 aa, Artificial Sequence; identical to SEQ ID NO: 25248
  Synthetic

SEQ ID NO: 25251 - protein, 60 aa, Artificial Sequence; identical to SEQ ID NO: 23529
  Synthetic

SEQ ID NO: 25252 - protein, 56 aa, Artificial Sequence; identical to SEQ ID NO: 23530
  Synthetic

SEQ ID NO: 25253 - protein, 57 aa, Artificial Sequence
  Synthetic
SKEDRLREELKKLLARLAEEIERLKRALEESNKDLKRTIDASEKHLRDVNEDVKRGG

SEQ ID NO: 25254 - protein, 59 aa, Artificial Sequence; identical to SEQ ID NO: 24672
  Synthetic

SEQ ID NO: 25255 - protein, 57 aa, Artificial Sequence; identical to SEQ ID NO: 25253
  Synthetic

SEQ ID NO: 25256 - protein, 59 aa, Artificial Sequence; identical to SEQ ID NO: 24672
  Synthetic

SEQ ID NO: 25257 - protein, 60 aa, Artificial Sequence; identical to SEQ ID NO: 24699
  Synthetic

SEQ ID NO: 25258 - protein, 59 aa, Artificial Sequence
  Synthetic
RETAERARETLKRLLDENRDRSKKVKEEIRRILEDLTRTTERVKREIAKLLKELEDTAR

SEQ ID NO: 25259 - protein, 60 aa, Artificial Sequence; identical to SEQ ID NO: 24699
  Synthetic

SEQ ID NO: 25260 - protein, 59 aa, Artificial Sequence; identical to SEQ ID NO: 25258
  Synthetic

SEQ ID NO: 25261 - protein, 58 aa, Artificial Sequence
  Synthetic
SELEEVLRRIEALVRKAHKENEDVLREIERLVRTAHRLNKKVDDDSAKIAEDLKRGGR

SEQ ID NO: 25262 - protein, 58 aa, Artificial Sequence
  Synthetic
EAVRRLKEILERLKEEVRRSLEELRKEVERLKKEVEDSLRELKKSLEEWVKSLEEATR

SEQ ID NO: 25263 - protein, 58 aa, Artificial Sequence; identical to SEQ ID NO: 25261
  Synthetic

SEQ ID NO: 25264 - protein, 58 aa, Artificial Sequence; identical to SEQ ID NO: 25262
  Synthetic

SEQ ID NO: 25265 - protein, 56 aa, Artificial Sequence
  Synthetic
SKEEELEKLLREHHEKIKRLKEESKRINDRIRRTVEELIKESEKINRDINDTVRKG

SEQ ID NO: 25266 - protein, 56 aa, Artificial Sequence
  Synthetic
EDSVERIARELERNLDDLARVLKESEDDLAEILRRLKEVLEESERDLERVEREVRK

SEQ ID NO: 25267 - protein, 59 aa, Artificial Sequence
  Synthetic
SEAEEAAERAKRAAKEAVERAKRAVERNEEAARRAAEKAREATERAERAARRAADKARK

SEQ ID NO: 25268 - protein, 60 aa, Artificial Sequence
  Synthetic
IKDAADKLAEAAKRAVDISKKAADDLKRLAKEDNEIAREAARRLAEAAKEAVKLVDDVTR

SEQ ID NO: 25269 - protein, 56 aa, Artificial Sequence
  Synthetic
SEKEKAAEDLRRAIEEAKKRSEEAAKELEDALRKAEKEARDSAETLKEAAKRAADA

SEQ ID NO: 25270 - protein, 59 aa, Artificial Sequence
  Synthetic
KDAATEAKKAADTIAKLIEDNAKRALEAAREIAKLIEKSAKEALEAAERIARLIEEAAN

SEQ ID NO: 25271 - protein, 59 aa, Artificial Sequence
  Synthetic
SVEEAARRAAKALKDAAKKLLEANEKAARAWKELAKELIKADEKALKILEEAARKARRD

SEQ ID NO: 25272 - protein, 57 aa, Artificial Sequence
  Synthetic
AEEAAKEAIRIAEEALRRSAEAAERAARIAEDAARKSRKAAEDAAKIAKEAADRARK

SEQ ID NO: 25273 - protein, 62 aa, Artificial Sequence
  Synthetic
SEEDRLRELAERARRLAKRNRELAKEIIDEIRKLIRDAREAAKKSAEKAKRLIDDARRVAGK

SEQ ID NO: 25274 - protein, 56 aa, Artificial Sequence
  Synthetic
IEEAAKANEEAIKASEEAVDEAARALEEAAEASKRANEKADKALEDAVRAAEEATR

SEQ ID NO: 25275 - protein, 61 aa, Artificial Sequence
  Synthetic
SEKEDVLRRIREAHERNKRLLERVAEEIKRIVEESRKLLEDVRKKAEDAARRAEEALRKEA

SEQ ID NO: 25276 - protein, 56 aa, Artificial Sequence
  Synthetic
KEALLKAAKEALEALEEALRLIAKATEEAARAAKEALDLILEADRKSAKAAEEALR

SEQ ID NO: 25277 - protein, 61 aa, Artificial Sequence
  Synthetic
SEREEVAKRATDAHEENERLLREVEKRIKEALERNEELLKRVSDKAREAAKKLEDALRRRA

SEQ ID NO: 25278 - protein, 56 aa, Artificial Sequence
  Synthetic
KEALRRAAKKALDAAEEALELIRKASKEAADAAREALKLILEADKKSLEAAREALR

SEQ ID NO: 25279 - protein, 60 aa, Artificial Sequence
  Synthetic
SEREEIEEIKKRVDRTLEEYERKVEDIRRKLTELKDESDKKVKDVRRKLKETEDRVREEG

SEQ ID NO: 25280 - protein, 58 aa, Artificial Sequence
  Synthetic
EELRELIERLVRIAEEVSEEDERVLRSLEDILRKVVEENERLLERLKRILEELIRRTR

SEQ ID NO: 25281 - protein, 58 aa, Artificial Sequence
  Synthetic
SEDEELKKELEKLLKELEEKLEKYRDDLRKDKERLKEKLDRYRERLRELMEELKDLLD

SEQ ID NO: 25282 - protein, 59 aa, Artificial Sequence
  Synthetic
EDVLRDIVRRVVEVLRKNLKIVEEIIRKIEELLEKNLRLVEEILRRIARLLEEVLEKTR

SEQ ID NO: 25283 - protein, 60 aa, Artificial Sequence
  Synthetic
SDAEVIEELVRLHRKLLEDILKLLKELVDIHRETLRRIEEIVERIVRLIEALLDKIRKEG

SEQ ID NO: 25284 - protein, 59 aa, Artificial Sequence
  Synthetic
KEALERLLERLKEIVDRIKEELDRLLKRSEDSIREIEERVKRLLEESKRVVDEIRERLK

SEQ ID NO: 25285 - protein, 57 aa, Artificial Sequence
  Synthetic
SKEKKILDRLRELLKESRDLNRRVKETLKKLLEDSKRLLDEIRKRLKELLDELEKEN

SEQ ID NO: 25286 - protein, 55 aa, Artificial Sequence
  Synthetic
EAVKRLKEVLDEVAELVKTLLEVNRKILEDVDKLIEEVLKLNDDILREVVKLAED

SEQ ID NO: 25287 - protein, 61 aa, Artificial Sequence
  Synthetic
SEKEKLLEDIADIARKILKLLKEHLDKLRKLLEEIRRLLEEHSRVLRELIERILDALRRKK

SEQ ID NO: 25288 - protein, 55 aa, Artificial Sequence
  Synthetic
KDLERELKRVKEISRKLEEELKELKERVKRDSEKMNEDLDRLLEDAERRIRKTRE

SEQ ID NO: 25289 - protein, 59 aa, Artificial Sequence
  Synthetic
SEEDKVLEELKRLLEELLRKHEEVLKEIKELLDKIIKKHEESLRRIKKLAEEIKERAKK

SEQ ID NO: 25290 - protein, 59 aa, Artificial Sequence
  Synthetic
KTLTEELKRIEDKLEELIRRSKDELDKIVREAEKIIEESKRRLEKLLRELERIIEDAKR

SEQ ID NO: 25291 - protein, 60 aa, Artificial Sequence
  Synthetic
SELEELVKRIEKTLRDLRRKNEELRKEVEEVEREDRERLERAAEDLERVEKKVEDEVRRR

SEQ ID NO: 25292 - protein, 57 aa, Artificial Sequence
  Synthetic
IEKTIEDARRLLEKILKLHRENSEESRRLIEDINRVNRELIDEVAELAKKILRRVEE

SEQ ID NO: 25293 - protein, 61 aa, Artificial Sequence
  Synthetic
RDEELLERVERLLRELLDTNRRKLEEVEKELRRLLETNKKTLDDVRRLLKELLDVLETREV

SEQ ID NO: 25294 - protein, 55 aa, Artificial Sequence
  Synthetic
DDLRELKKRIEDLLKEDKERLEKIARDIERDLERYRRDLKRLEDELREDIERARR

SEQ ID NO: 25295 - protein, 58 aa, Artificial Sequence
  Synthetic
REEEVLRRLREIIKRLLDKNRKVNEDLVRLIKRVLDKNREVLKRLRDLIRELLEVVRN

SEQ ID NO: 25296 - protein, 60 aa, Artificial Sequence
  Synthetic
DEDLERALKKVKDELERIVRENEDADRKIKEEVDRLSEENEKVNREIKKELDDVVEETKK

SEQ ID NO: 25297 - protein, 56 aa, Artificial Sequence
  Synthetic
EEDERLTKRVEEIKRENRELLRRLEEEVKELERKSEKIVRDLKEKVDRAKEKLDSN

SEQ ID NO: 25298 - protein, 57 aa, Artificial Sequence
  Synthetic
DKDVLTELKRILDELLKLVEKLIRRNLRLLEELLRLVREILRTSNEILEEILKDARR

SEQ ID NO: 25299 - protein, 60 aa, Artificial Sequence
  Synthetic
SELDTLVELIKRILEEITRVNKELVDEVRKLLEEIVRINERSVRTIEKILRDIAELIRRG

SEQ ID NO: 25300 - protein, 60 aa, Artificial Sequence
  Synthetic
EEELEKELRRLKKELEEVVRKSREDLERLKKELEKIVKESEDELKKVEEKVKKLADDARR

SEQ ID NO: 25301 - protein, 58 aa, Artificial Sequence
  Synthetic
TEEEVLRKVEKLIKDLLDVLRDLLRASEEVVREALRVLEELIEENKRVIEELSRALSD

SEQ ID NO: 25302 - protein, 60 aa, Artificial Sequence
  Synthetic
ERKLRRDLTETKKELEKRHEDLRRELEKLLRDYKRELEEIERRLEEIEKTLKRRADETRR

SEQ ID NO: 25303 - protein, 58 aa, Artificial Sequence
  Synthetic
SDLERLEKEIRDLLDELRRLTEELEKRSRDILKRLKEILEELKRRIERLLDELRRRRG

SEQ ID NO: 25304 - protein, 58 aa, Artificial Sequence
  Synthetic
DSVRELIEVLKKALEDVRRVLRAIEEIVRRSVELNEKHSRELRRVLKELLELVAKAAE

SEQ ID NO: 25305 - protein, 55 aa, Artificial Sequence
  Synthetic
SEEEELRKLAKKIEEVIKTSRDKLDKSRKELEKVIRDIERRLRELRRELEELVRR

SEQ ID NO: 25306 - protein, 57 aa, Artificial Sequence
  Synthetic
REDVLREIEKLLEEILRALRKLLKDLLDLHDEVLKADEKLLKRLREIVKKVLEEVRK

SEQ ID NO: 25307 - protein, 55 aa, Artificial Sequence
  Synthetic
SEEEKLRELRKRLEDTVRRSKEELEKSTEELKDVIKKSEEKLEELKRRLEEMKRR

SEQ ID NO: 25308 - protein, 57 aa, Artificial Sequence
  Synthetic
SEKLLTDAARILDDVVRVDRELLRLVLELHKRLVRADEKLLTDIRELARRVLEETRK

SEQ ID NO: 25309 - protein, 59 aa, Artificial Sequence
  Synthetic
DEDERLRELRDRVRRSEEEDERRNKRHEERVKELEDEDKERNERHRKRLKEITDRLKER

SEQ ID NO: 25310 - protein, 55 aa, Artificial Sequence
  Synthetic
EDLLKVVRDSLEILKELIRTVLKAIEESLRILEELIERLKRHIETILRLAAETTT

SEQ ID NO: 25311 - protein, 59 aa, Artificial Sequence
  Synthetic
DEEELEKEIKKLLEEATKKHEDVKREIKERLEKLRRDHEEAEKRVRDELRRLEEELERR

SEQ ID NO: 25312 - protein, 55 aa, Artificial Sequence
  Synthetic
EDLIRVLKKLIEDLERLLTKNRRLLEEIVKILTKLLKDNRDLLRRILRKVEETAK

SEQ ID NO: 25313 - protein, 57 aa, Artificial Sequence
  Synthetic
DEARRIKEIVDRAVEIWRRLVEEIKRIVKEVLDKWRKLIRELIELVRKALEDLRRTN

SEQ ID NO: 25314 - protein, 58 aa, Artificial Sequence
  Synthetic
DELKRLEDDVRKKLKDLEDKLRKLRKELEETHRRLAETIRRIAEELERLHRELKRESK

SEQ ID NO: 25315 - protein, 57 aa, Artificial Sequence
  Synthetic
SKDERLRKVLEDVERLLREVLKKHRKVIDDLRELLKRVVEIHRRVLEEILKRLEEEG

SEQ ID NO: 25316 - protein, 59 aa, Artificial Sequence
  Synthetic
DEVVERIRRTLEEIERRLRKTDKDLEKDLRELKKDLDRTDEELKRKVEKLKRELKETSK

SEQ ID NO: 25317 - protein, 61 aa, Artificial Sequence
  Synthetic
DEKDRLEEEVRKLLKEAEDELRRLKRENEKLNRELKETLKRVKEESERLLRKLREDVRKDG

SEQ ID NO: 25318 - protein, 57 aa, Artificial Sequence
  Synthetic
LEEVLEELDRLNKEVLKAIEEAAKKLEDLNRRVLEVLEDILRKLKEIVDEALKVLRK

SEQ ID NO: 25319 - protein, 59 aa, Artificial Sequence
  Synthetic
KEEELLERLREVLKTDLDLLRDLVRTLKEDLDKDARLLEELVERLKKLLDKIKRLLEEE

SEQ ID NO: 25320 - protein, 56 aa, Artificial Sequence
  Synthetic
ERVKREIRKDLDKIRREIEKIVKESEESNERSLEKIDRILEESKRRNERLKRELDR

SEQ ID NO: 25321 - protein, 60 aa, Artificial Sequence
  Synthetic
SKKETIRKLIEENKDIIRKLAEKLKRLLEESERIAEEALRLIKELLERIERALRRVAKDI

SEQ ID NO: 25322 - protein, 55 aa, Artificial Sequence
  Synthetic
KELEKLLEDLEREIRRLKKRLKELSDRLEEKIRKIKRELDDLSRRLREKIERTRK

SEQ ID NO: 25323 - protein, 60 aa, Artificial Sequence
  Synthetic
DDEKRLKDRLREALKRNEELLDRLRRRVEEILDRNRKLLERVRRELERVLKELEDLIRRG

SEQ ID NO: 25324 - protein, 56 aa, Artificial Sequence
  Synthetic
ETVLRELVEELERVVRRILELLKRLSDASKRVVEEILELLRRLSEKTAKAVDDTRT

SEQ ID NO: 25325 - protein, 56 aa, Artificial Sequence
  Synthetic
DDERRLETLIRLSRELIERVRKLLRDIIRTSKELIEEVLETVKRILDKIEELAKEV

SEQ ID NO: 25326 - protein, 55 aa, Artificial Sequence
  Synthetic
EKISRKVEELEKEIRRLIEELKKKNEEVEKKIREIMKELDERSERLRRELDRTRD

SEQ ID NO: 25327 - protein, 60 aa, Artificial Sequence
  Synthetic
SKEDELRKELEEVVKRIEDALRKLKERSKRVAKRVKKLLDDLKKESEEVVESLREKLEKE

SEQ ID NO: 25328 - protein, 59 aa, Artificial Sequence
  Synthetic
ESVRKLLEELRRLHERIIKIIEEILELLRRVHKEVAKDVRRLARELEELVRRLVETLRR

SEQ ID NO: 25329 - protein, 58 aa, Artificial Sequence
  Synthetic
SAEEILDTVAELIKTHLKIVREVLKTVRDLNRRSLDLIRRILERMRRLVERLVRLIRN

SEQ ID NO: 25330 - protein, 56 aa, Artificial Sequence
  Synthetic
EKRLREVEEEVERRLDTVRRELEEVEKESDRLLEELEKKSEDFERDIRRLLKEAKT

SEQ ID NO: 25331 - protein, 56 aa, Artificial Sequence
  Synthetic
SKREEIEKLLEDLKRDNKRVLDRLREVIKDNEDKNEKAVRDARELLERLKRELEEG

SEQ ID NO: 25332 - protein, 55 aa, Artificial Sequence
  Synthetic
EALKRLEEVAKELLKLIEEVLKENERSNREILRLIAELVKRNARVNEELLEIARR

SEQ ID NO: 25333 - protein, 61 aa, Artificial Sequence
  Synthetic
EKDDRIREKVKEIERRNDKALDDIRRRVEEIKRENDEVLDRIRKELEDLKKEVEEVAKRTG

SEQ ID NO: 25334 - protein, 59 aa, Artificial Sequence
  Synthetic
EELKKLLDKLLEDLRRIVKKLEELLKKNDDELRKIVKEVKDLLKRNHDELERIVREARR

SEQ ID NO: 25335 - protein, 61 aa, Artificial Sequence
  Synthetic
SKEEKIERDVDEIRKENEEVLRRIRKKVRDIERENDEILRKIEEDLRRIEKDLERVAKERG

SEQ ID NO: 25336 - protein, 59 aa, Artificial Sequence
  Synthetic
EDLRELLRKVLESLRRIVERVDRTLKDNDRKIEEIVRELKELLKKNNDALRKIVEDAKR

SEQ ID NO: 25337 - protein, 59 aa, Artificial Sequence
  Synthetic
SREEVFELLLDVLRKIVELIKDLAKKNIDVLKKLMELIDELVKINEKSLEDLLRLIREG

SEQ ID NO: 25338 - protein, 56 aa, Artificial Sequence
  Synthetic
EKELEDEARRLKKEYRDEVERLKKEIREIIERYKDALRKLEREIEDITRRLKERAD

SEQ ID NO: 25339 - protein, 62 aa, Artificial Sequence
  Synthetic
SKLEDLLRRAEELLKDIVRANERLLEEIRKLLKEIVKANEDLLRKVKRLLEEAVEMAIRERG

SEQ ID NO: 25340 - protein, 56 aa, Artificial Sequence
  Synthetic
EEIVTRVRKKVEELKEEVKRINDEVRKKVRDLEETSKRILERVEDLVRELKERARR

SEQ ID NO: 25341 - protein, 59 aa, Artificial Sequence
  Synthetic
SKEDKARELEKRLRDNLKKLEEVVRELAEVLKRNLEKLRRLAEELLRALKRLLDKLRAG

SEQ ID NO: 25342 - protein, 56 aa, Artificial Sequence
  Synthetic
EDLVRDIRRELKELEERARKILRDDERDLRALEKRIRDIIREDREELERLKERARK

SEQ ID NO: 25343 - protein, 60 aa, Artificial Sequence
  Synthetic
KREDILKKLEDIIRDIIDKLRRILEKVKRLNEDIIREIKRLLDESLKTLEDLLKRIADKS

SEQ ID NO: 25344 - protein, 58 aa, Artificial Sequence
  Synthetic
EEIKRLKEELERRHRRLEEEVERVARELEKRHRDLERDIRRVAEELKKLLKKLRDDRR

SEQ ID NO: 25345 - protein, 57 aa, Artificial Sequence
  Synthetic
REKEELSEEIRRRLDELRKLLEEYEEEVKRLLTRLRDKLRRYKEEVERLLRKLKEDN

SEQ ID NO: 25346 - protein, 55 aa, Artificial Sequence
  Synthetic
KEAVDLVRDVLRRVEKVNRELLELIKEVADRVRERNKELVELIDRLLERLKRADK

SEQ ID NO: 25347 - protein, 60 aa, Artificial Sequence
  Synthetic
SEEETVERLLEEARKRHEEIIKKAKELLDRAREEHERIIREAEKLLEEIKKRVDELVRDG

SEQ ID NO: 25348 - protein, 56 aa, Artificial Sequence
  Synthetic
RKTLLREIEKLLKTLEDILRDLLRLVEKTLKELEEILKDLVDKARENLKRLRERIR

SEQ ID NO: 25349 - protein, 57 aa, Artificial Sequence
  Synthetic
SKEEEIVKEVEKIVEKLLEVNRRALERIEEIVRKNLKVNRELVEEIERIVEELIRTG

SEQ ID NO: 25350 - protein, 56 aa, Artificial Sequence
  Synthetic
EEMLRRVLKKIEEVIRRAREEHEKSTRELEEVIKELKKRHEDVTREAKKVIDDLKR

SEQ ID NO: 25351 - protein, 56 aa, Artificial Sequence
  Synthetic
SEKEELKRLLDKLLKELKRLSDELKKTIDKILKILKEVSEEVKRTADELLDAIRRG

SEQ ID NO: 25352 - protein, 59 aa, Artificial Sequence
  Synthetic
EDELRKVEEDLKRLEDKLKKLLEDYEKKVRELEETLDDLLRKYEETLRRLEKELEEEER

SEQ ID NO: 25353 - protein, 56 aa, Artificial Sequence
  Synthetic
SRVERLEKLLEEHKRLVEDLIRLLDELAKKHDEDVRRLIERLKELAERLKRLLERS

SEQ ID NO: 25354 - protein, 56 aa, Artificial Sequence
  Synthetic
KRDVDRIREEIKKLIEDVRREIKRVEDKHKKDIDRVKEKLDRVRDRHEKMAEDSKR

SEQ ID NO: 25355 - protein, 60 aa, Artificial Sequence
  Synthetic
REKEELLRLLKEIAERILDILRKALELLDRVVELDNRTSKELLELSAELVKRILEAVRDG

SEQ ID NO: 25356 - protein, 60 aa, Artificial Sequence
  Synthetic
EEEKKRLLDDLRRILREYEERVKKLNDEHKKLEKEIKDKVKRILDEIRRTLDKILKELRK

SEQ ID NO: 25357 - protein, 60 aa, Artificial Sequence
  Synthetic
KDEERLVKKIRDSLRKYEDLLRKLVERIRDLLRRYEEELRKLLTEIEKTLEDVRDVLRRK

SEQ ID NO: 25358 - protein, 58 aa, Artificial Sequence
  Synthetic
DLLEMLRRLVERLKRLIERVLKLNRELVKKLLELLEEALRRNRRLVEDILKIADEARK

SEQ ID NO: 25359 - protein, 58 aa, Artificial Sequence
  Synthetic
SDEDRKRKKLEDVERRLEKLLREYEEKVRRVLEELRRLLEENKRHVEELEKRLRDRAK

SEQ ID NO: 25360 - protein, 56 aa, Artificial Sequence
  Synthetic
LEEALERLRRLLEELLRINERIIELIRELLEDNRRILEEILKLIKDLLRRAERIVD

SEQ ID NO: 25361 - protein, 56 aa, Artificial Sequence
  Synthetic
SEEEDLEREKRRLDKYSEDDRRRAEKVLRELEEEVKKSRKRLEDAKRRLDEEVRRN

SEQ ID NO: 25362 - protein, 59 aa, Artificial Sequence
  Synthetic
EEVLRILKTLVKELEDILRELLKINEDLVRRLERILRELLKSNDNLVKELEKLLEKARR

SEQ ID NO: 25363 - protein, 63 aa, Artificial Sequence
  Synthetic
EKKERIREALERAVRTLEKLLEDDKRELDKARREVRELLRRDKEELDKVVERVERELDRARER

SEQ ID NO: 25364 - protein, 58 aa, Artificial Sequence
  Synthetic
RKLEEILRLLEEALRRNSETLEEILRKLEEILKRNRKTLEDLLKLVKEILDEIRERLR

SEQ ID NO: 25365 - protein, 59 aa, Artificial Sequence
  Synthetic
SLTERVLDLARDLIRILLEIHKRALKLIAELVKKLLKIHEDVLKLSEELVEELLEIVAR

SEQ ID NO: 25366 - protein, 60 aa, Artificial Sequence
  Synthetic
EDTLRRVLERIREEVERVKEKHRRLLEELKKLLEELRKRSKDLLEDIKRKVRELEEKTRR

SEQ ID NO: 25367 - protein, 60 aa, Artificial Sequence
  Synthetic
REDEELTKRVEKILRDAERLVRKLHRENREILKTLKRLVEELEKENRKVLKDAEDLVRKE

SEQ ID NO: 25368 - protein, 56 aa, Artificial Sequence
  Synthetic
ARELLKELKRIVKKSLDELRKLLKKLEDIVRESNERLKEVLKKITDLIRKVLEDIR

SEQ ID NO: 25369 - protein, 58 aa, Artificial Sequence
  Synthetic
SEEDKIAEELKETLKRYRDRLEEIRKELEDKLREYEKRLEDLARELEKKLRKLEARDV

SEQ ID NO: 25370 - protein, 55 aa, Artificial Sequence
  Synthetic
EDVRRVVRELLRKLEDILRESEETNKETLEKIDEILKESERTNREVIRKLKETTD

SEQ ID NO: 25371 - protein, 56 aa, Artificial Sequence
  Synthetic
SAEETLRRITEESKRVLEEITKKYEDLERESREVLRKLREDLDRIKRELEDVLTKG

SEQ ID NO: 25372 - protein, 60 aa, Artificial Sequence
  Synthetic
RERLARLLKKLADKLIRVLEEILKINEELNRKIIKFARENLERNRRVNKKVIEVLREAAR

SEQ ID NO: 25373 - protein, 56 aa, Artificial Sequence
  Synthetic
SEDEKLKKEVDDVLERAKRLLDRLREANEDVLRKAKEDLDRLLKSNREILEELRKI

SEQ ID NO: 25374 - protein, 56 aa, Artificial Sequence
  Synthetic
ERVLERLLKALKEHSDELKKVVEELLKLLEEHLREVEKLVRELLADLKRLLDKTRK

SEQ ID NO: 25375 - protein, 61 aa, Artificial Sequence
  Synthetic
SKIEELLTKLAELLKEVIDELRKNLKRLEETVDENLKTMEDLLRKLEEVVREVLDIATKKN

SEQ ID NO: 25376 - protein, 55 aa, Artificial Sequence
  Synthetic
DEVRKRLDERAERLEKEVEEVKKENDERAKRSAEEVKKLLDKLDEALRRLEEEVR

SEQ ID NO: 25377 - protein, 61 aa, Artificial Sequence
  Synthetic
SEDDELIKKIKKLAEEIIDEIRKLIEKSKEILKRLLDELRKLIEKSKKLLKETLDKLRKDK

SEQ ID NO: 25378 - protein, 56 aa, Artificial Sequence
  Synthetic
EEALKELEKKTRDLEDEIRKVKDDVKRRHDELKEEIERVLDELRKVLKRLEDEARK

SEQ ID NO: 25379 - protein, 61 aa, Artificial Sequence
  Synthetic
KTEEILKRVKEILDELAKELRDIIRESLRTIEELLDELRRILEESERTLEELVKTIKDEVK

SEQ ID NO: 25380 - protein, 59 aa, Artificial Sequence
  Synthetic
DEVKRRLEEKERRIRTRYEELRRRLRKRVKDYEDKLREIEKKVRRDAERIEEELERAKK

SEQ ID NO: 25381 - protein, 57 aa, Artificial Sequence
  Synthetic
EELEDVLRRIEEVLREIIRLLEEHHDMVRRAVERIKRLLEDHHKKVEDILREIKRRI

SEQ ID NO: 25382 - protein, 59 aa, Artificial Sequence
  Synthetic
EKVKKELKDLARKAEKLSEDVRRELEETVKDLRRKSKEVEDRLDKLTEEIRRTLEEKRR

SEQ ID NO: 25383 - protein, 59 aa, Artificial Sequence
  Synthetic
KDEERLTKTAKESLDHNKELLDRIRKKSKEVLDHNKELLDRIREEIKRLLEELDRLKRE

SEQ ID NO: 25384 - protein, 56 aa, Artificial Sequence
  Synthetic
VEEVIKEVKKMLERALEELREVNDRDRRANERALRILEALNEEDKRATKRVLERKK

SEQ ID NO: 25385 - protein, 60 aa, Artificial Sequence
  Synthetic
REKEELLKLIKRVIELLKRVLEEHLRLVEDVIRRLKELLDSNEKIVREVIEDLKRLLDEV

SEQ ID NO: 25386 - protein, 59 aa, Artificial Sequence
  Synthetic
EDLLRKAKKVITEVREKLKRNLEDVRRVIEDVKRKSRRILEEARRLIEEVERELEKIRK

SEQ ID NO: 25387 - protein, 58 aa, Artificial Sequence
  Synthetic
SKVERILRLIEELLRLLREALRKIHRINEELIRTLEEVLREIHRINEDLNRKLREATG

SEQ ID NO: 25388 - protein, 59 aa, Artificial Sequence
  Synthetic
EELKDRVREELDRSRKKLRKLEEEMRRKLKRSREELKKLEEDLRRELKKLREELERIRR

SEQ ID NO: 25389 - protein, 57 aa, Artificial Sequence
  Synthetic
SRKERIKRALEEHIRKLKEITDEVRKTNEELLELTRRILEEAKKANEELVKKIREAL

SEQ ID NO: 25390 - protein, 56 aa, Artificial Sequence
  Synthetic
EEALKELEEKLDRYRRKLEDLLRKYAKKLEDYKRKVKKLEEENEELLKRIEKEMEK

SEQ ID NO: 25391 - protein, 56 aa, Artificial Sequence
  Synthetic
SEKEELEKRLRKKLEEIKELVERYKRRLEELLRRHREELKEIEKRLEDLERKIEEL

SEQ ID NO: 25392 - protein, 55 aa, Artificial Sequence
  Synthetic
EEVKKIIEELLRLAEEVLRRNKRLIEALLELHEDEFRKVEEIIKELSEEAKRASK

SEQ ID NO: 25393 - protein, 57 aa, Artificial Sequence
  Synthetic
REKEKIREALETNLRLLEELIKRLKEILDTHNELLRRVIETLERLLKELLELLEEAG

SEQ ID NO: 25394 - protein, 56 aa, Artificial Sequence
  Synthetic
KEDLERLRRKVEELEDRLRRLLEKLKRDSDELMRELERILDRYRRESEELDRRLAE

SEQ ID NO: 25395 - protein, 58 aa, Artificial Sequence
  Synthetic
SELERLRKILDDLRKKVERVAEEHKRANDKLAEEIRRVLKTHREMNERAIEEVKRTVG

SEQ ID NO: 25396 - protein, 55 aa, Artificial Sequence
  Synthetic
REVDKRLRELLEEHKKLVDDLDKRARKVHKEHKDKVDKLREELEKTLRDIKRETD

SEQ ID NO: 25397 - protein, 60 aa, Artificial Sequence
  Synthetic
DSDEIVKTLLEKLRRILKEVEEIARENHKRDRDANREINKLVEDIARRLEEVAERLREVI

SEQ ID NO: 25398 - protein, 59 aa, Artificial Sequence
  Synthetic
EKDLRRLRKDIERLKEEVKRALDELRKKYKKIEDDNRRLVERIRRELKKILDELDEKRQ

SEQ ID NO: 25399 - protein, 58 aa, Artificial Sequence
  Synthetic
SEIEKVLEINRRVLKELERIVKKVLDIDKEAAELLRDIIRRVLEIIKKVIDDIIRTRG

SEQ ID NO: 25400 - protein, 59 aa, Artificial Sequence
  Synthetic
KDLEEKLRRVLEELKRLVDDLRRLIDEIKKRYERMVEELKKEIERVLRENEEAVKDLER

SEQ ID NO: 25401 - protein, 59 aa, Artificial Sequence
  Synthetic
SEEEELEKIAREVLRELKEILEELDDIYRRVTDRLRKLLERLKKEYEEVKKELEDLKRR

SEQ ID NO: 25402 - protein, 56 aa, Artificial Sequence
  Synthetic
EELVDRLIKLLDENLKRSEEVIREIIELARKNAEDSRRVIKKIIELLREMLKDARR

SEQ ID NO: 25403 - protein, 62 aa, Artificial Sequence
  Synthetic
DSERELEKVLKDAKEKLDRSLEEVKKVTRETEKRIEEIDKEVKEVLEEADRRVKKIETDKER

SEQ ID NO: 25404 - protein, 56 aa, Artificial Sequence
  Synthetic
ERLIREIKRIIERVIEILKDIAKEILDLDRESVRLDTEVLKKLLDIIREVVKEAKK

SEQ ID NO: 25405 - protein, 62 aa, Artificial Sequence
  Synthetic
DEEREVRKVLRRAEELLRRSLKKAEEVTRETRKRIKELLDELRKVLERAERELRRIRREKER

SEQ ID NO: 25406 - protein, 56 aa, Artificial Sequence
  Synthetic
DRLIEEIKRILEEIIKLIADLARRVLKIDEESVKLDEDNLREVLKILEDVVRDSER

SEQ ID NO: 25407 - protein, 56 aa, Artificial Sequence
  Synthetic
SEEEEIKKDLERLIDKLRRTSKRLIDDYRRVLEELERTIKRLLEELEELIDELRRR

SEQ ID NO: 25408 - protein, 59 aa, Artificial Sequence
  Synthetic
EKVERALERILELLKRVIEELERLAEEVLRLSKRVAEENKKLLEEILRILEEIIRRAKK

SEQ ID NO: 25409 - protein, 62 aa, Artificial Sequence
  Synthetic
SKEEELEKLVRKVEEDLKRLEEESERIKKEIKDTLRKIRKRSEDLKRKVKELLRRLEEEARR

SEQ ID NO: 25410 - protein, 60 aa, Artificial Sequence
  Synthetic
VDEALEMLKRLLDKALKVHEDVLRKLVELVDEVLKVHEESLRKLLTLAKKVLEVLRKITK

SEQ ID NO: 25411 - protein, 60 aa, Artificial Sequence
  Synthetic
DDERRKLEDLERMVEELKRKSDKLLKEIREEVERLERETRKLLEELKRKVDELREDLRRN

SEQ ID NO: 25412 - protein, 55 aa, Artificial Sequence
  Synthetic
EDLEKAERLVKDILRLNEEHTKELEDVVRDLLRKLEKHTRDLEKLVKDALDKVKT

SEQ ID NO: 25413 - protein, 60 aa, Artificial Sequence
  Synthetic
SEKEELLKRLEDVLRRIKERLDELRRRYKKALDELREESKRLIEKLDKVLREIEELIKRK

SEQ ID NO: 25414 - protein, 59 aa, Artificial Sequence
  Synthetic
EEILRLLLELLEESIRVAREVNRLLLRLLEKNKELVEEVLKRLLDLLKKIIDIVREVIT

SEQ ID NO: 25415 - protein, 62 aa, Artificial Sequence
  Synthetic
SKIDEALKKLRKILEDAIKLNKELNDTTREILKEIIKLNREVLEKIRRILKELVDLILKDLK

SEQ ID NO: 25416 - protein, 55 aa, Artificial Sequence
  Synthetic
EELRRVVEKVRKELEDDKERYKRLEEEVRRLLEEMKRRSEDLERKVEEILRRLTE

SEQ ID NO: 25417 - protein, 58 aa, Artificial Sequence
  Synthetic
SEKELLEDLRRKAKEVKDRHEELLRDLERTLKKLKDEHDKKLKDLRDELRRVEKKLDD

SEQ ID NO: 25418 - protein, 55 aa, Artificial Sequence
  Synthetic
KELLKEVKDLLRKLEKVVRDSLELLKRLLEDIEKRVRDSNRELKRILDDIEKKAK

SEQ ID NO: 25419 - protein, 57 aa, Artificial Sequence
  Synthetic
DKEEELLKKLEEVLKKAEDLIRESNKALKELLDEAVKIVEDSLRELERTLRDIERKV

SEQ ID NO: 25420 - protein, 55 aa, Artificial Sequence
  Synthetic
EDLRETEKDLRRLSEEHKRLLEELRDKARRLTERHEKALKEIEDELRKIKDEARR

SEQ ID NO: 25421 - protein, 59 aa, Artificial Sequence
  Synthetic
DEEEKIREDLERTLREYERELRRAKEELKETLKRYEEELREVKEDLDRTLEEVDDLLRR

SEQ ID NO: 25422 - protein, 60 aa, Artificial Sequence
  Synthetic
KKTLLRDLKEALKTLIKLIREILEDNLRVLRRIIELIETLLEDNRRVLEEIIKLIEEATT

SEQ ID NO: 25423 - protein, 59 aa, Artificial Sequence
  Synthetic
STKEEVERIVEELRRAHEKSLRDVKKILDDLAKIHDDSLEDARRIIEKLDRILEEIKDR

SEQ ID NO: 25424 - protein, 56 aa, Artificial Sequence
  Synthetic
DKLLEDVKEEIRKVKERIEDLLRRSRELLERLRKRLDDLLADSERKIDEVTKRTRK

SEQ ID NO: 25425 - protein, 58 aa, Artificial Sequence
  Synthetic
DELEKVERLLEEIEKIIEDLIRRVEELVRRILEFNKTTLKRNEELVRELEKLVEETTG

SEQ ID NO: 25426 - protein, 59 aa, Artificial Sequence
  Synthetic
KEVVRKLEEDLRRVRERSKKLVREHEKFLEDLEETIKEEKRRVDEELKRIKEEIKETRR

SEQ ID NO: 25427 - protein, 56 aa, Artificial Sequence
  Synthetic
SEKERLMRLLDKLKDLNRRLVERIKELLDKALELHKKLVKELRELLERLKELVERA

SEQ ID NO: 25428 - protein, 59 aa, Artificial Sequence
  Synthetic
EETVRRLREALKKLEDDLRKIERDAEREYKKLKDELEELTERYRREIRKLKEELKKDRK

SEQ ID NO: 25429 - protein, 56 aa, Artificial Sequence
  Synthetic
SKREELKELLERLLKLDRDTLEELKRLLDELKKTNDDTLEILKRLLEEVLRVIRET

SEQ ID NO: 25430 - protein, 59 aa, Artificial Sequence
  Synthetic
KDRVREIERRLEELRKRLEKVERDLRDRHRKVKKKLDDVIEKVKRRHDELRKELEDAER

SEQ ID NO: 25431 - protein, 59 aa, Artificial Sequence
  Synthetic
KDEEEVEKEIRRLLEKVKDVLRRSLEELERLLREIKEVLEKLEREDEENIERIKRELER

SEQ ID NO: 25432 - protein, 60 aa, Artificial Sequence
  Synthetic
RETLIREIEKILRRLNELNRRLLREVERILERLLELHKRLLDELLRIAERLMRLVEEVKK

SEQ ID NO: 25433 - protein, 56 aa, Artificial Sequence
  Synthetic
SEAEDLEELIKELAELLKDVIRKLEKINRRLVKILEDIIRRLKEISKEAEEELRKD

SEQ ID NO: 25434 - protein, 59 aa, Artificial Sequence
  Synthetic
KDEAERRRRELKDKLDRLREEHEEVKRRLEEELTRLRETHKKIEKELREALKRVRDRST

SEQ ID NO: 25435 - protein, 57 aa, Artificial Sequence
  Synthetic
DEVEKLKKLLKELEELNREVVDTVKKLLDELVKLNRDVLREVRELLKKLIDALEKTG

SEQ ID NO: 25436 - protein, 59 aa, Artificial Sequence
  Synthetic
EELRRELKKLEEEIERALERIRRRSEETADRIRRTLEKLREKSERKRREIEDTLRKDRK

SEQ ID NO: 25437 - protein, 59 aa, Artificial Sequence
  Synthetic
SLLEKVKKVIERLLEIHKKLLEELKRLIEKVLRITRENLEEVKRLIKRAVEILRRIAEE

SEQ ID NO: 25438 - protein, 60 aa, Artificial Sequence
  Synthetic
EEEVTRKIEELRKKLTKLIRELEETLKEVKKRNEDALRRLEKESKDLAERVRRLIEELEK

SEQ ID NO: 25439 - protein, 60 aa, Artificial Sequence
  Synthetic
SDKEEIKRRVEKTARDLETEHDKIKKRLEDTVRDIKRELDELLEKYERVLRKIEKTLREG

SEQ ID NO: 25440 - protein, 60 aa, Artificial Sequence
  Synthetic
EKRLIEEVVRLLRENLDVVRRILEALAKLIKELLEALEEVLRRNKELIRELLRVLDEALK

SEQ ID NO: 25441 - protein, 60 aa, Artificial Sequence
  Synthetic
DEEERVKKLLTDLRRLLRKLHEESKKLLDELRKKLRELRRRSEEKLREVERRLREAEKKL

SEQ ID NO: 25442 - protein, 59 aa, Artificial Sequence
  Synthetic
EELLRVLEELVRTLKKLLDENLKMVERLIRELEKVLDDHERKVRRLIEELLEVLDRDAK

SEQ ID NO: 25443 - protein, 60 aa, Artificial Sequence
  Synthetic
DEDRIIEEIARLLEELLRELLELIKKLIETNRRLNEEHERAVRELARLLEELLDRLVKKV

SEQ ID NO: 25444 - protein, 59 aa, Artificial Sequence
  Synthetic
EKIKKEIERELEELRRMIKRLHEDLERKLKESEDELREIERRLEEKIRRLEEKLERKRR

SEQ ID NO: 25445 - protein, 59 aa, Artificial Sequence
  Synthetic
STEEKLRELVKRLEELLRDLERLLRELEKSNRDLNETALRLVEESDKLLEELLEKLARN

SEQ ID NO: 25446 - protein, 59 aa, Artificial Sequence
  Synthetic
KDTVKRLKEDLDKARKDHEKKLEDLERLLKRNEERLRKMKKELEDKVERLRRELEKKRK

SEQ ID NO: 25447 - protein, 59 aa, Artificial Sequence
  Synthetic
DEEEKIRTTLDLLRKLLKVLREILEELIRSNKELNERLLRLVEDSDRLLEELLKKLEDD

SEQ ID NO: 25448 - protein, 59 aa, Artificial Sequence
  Synthetic
EEKVRDTEKKLRDLREKHKEIAKELERLLRENRRRLEELKREAKKVLDELRKRLEDERR

SEQ ID NO: 25449 - protein, 59 aa, Artificial Sequence
  Synthetic
SEKEEVEKRLKDLEEESERLLKEVRDTLKRLEEESKKLIDELRRKLEELRKEVKELVDR

SEQ ID NO: 25450 - protein, 56 aa, Artificial Sequence
  Synthetic
DKALTKVVDDVLRVLERVIERLLRLNKESLKELERILEDLRRLNKKTLDVLREVTR

SEQ ID NO: 25451 - protein, 59 aa, Artificial Sequence
  Synthetic
KEKEEVEKKLKEAEEEHRRLNREVEEDLKRAKRESERLLEEMEKKLDELEERVERLLRE

SEQ ID NO: 25452 - protein, 56 aa, Artificial Sequence
  Synthetic
REVLEKLVRDALRTLREVLDRLRRLNEELLEVLRRVLRELERLTRELLKVLRDALK

SEQ ID NO: 25453 - protein, 60 aa, Artificial Sequence
  Synthetic
SEAEEVARRIKELVRELEKLLRDSEETIKRLIDKNRDLLRRIAETIDKLIKDLRDLLRRI

SEQ ID NO: 25454 - protein, 60 aa, Artificial Sequence
  Synthetic
DEDVRRALERVEKLLREILERLKRHSEELAELARRLLDENRRIIEEIIKLIEDILRELKR

SEQ ID NO: 25455 - protein, 61 aa, Artificial Sequence
  Synthetic
DLERLVEELARLLKEALDTLARHSERLIKLAREILETLRRHSERIAELIERILRELMERRG

SEQ ID NO: 25456 - protein, 59 aa, Artificial Sequence
  Synthetic
EELKKKLEDISREIKKSLEEVEERLRRISDDVRRSLEELKRILDEIEREIERRLREAKR

SEQ ID NO: 25457 - protein, 60 aa, Artificial Sequence
  Synthetic
SDEERLRKEIRDRVEELRKRLDDTEEEYDKRIRDLRRKIKEVEDRYREKIKRLEEKLRRG

SEQ ID NO: 25458 - protein, 60 aa, Artificial Sequence
  Synthetic
KDTVLRILKELMDRDEEILRRILKLIKELLDESKKTVRRVLELLKELLRKILKLVEEITR

SEQ ID NO: 25459 - protein, 56 aa, Artificial Sequence
  Synthetic
SKKEILKEVLRRILKLIRELIETIKKVLKRSLDLNKELIDINKEALDRILKLLTDI

SEQ ID NO: 25460 - protein, 59 aa, Artificial Sequence
  Synthetic
KRRLKKLADELKEILDRLREKNKEIADRAKELHDEVRERLKEIAKRLKDVLRDARERVR

SEQ ID NO: 25461 - protein, 60 aa, Artificial Sequence
  Synthetic
REMEEVLKRNLDAARRVLETLKRILDRLKELNERSLRSLRDILRELLDIAREVLDLRRAG

SEQ ID NO: 25462 - protein, 56 aa, Artificial Sequence
  Synthetic
IEKVRKDVEDLAKELEDRLRDVERESRRLLEELRETLERALRRVKELHDELREAIK

SEQ ID NO: 25463 - protein, 56 aa, Artificial Sequence
  Synthetic
SRKEELLRILRRILEIAEEIIRDLKKWLDDDRELVREILELIKRLNEDNNRLIREA

SEQ ID NO: 25464 - protein, 58 aa, Artificial Sequence
  Synthetic
DELRRLEEALKESKRLVEEVLKRIEDVLRESKKLADEIRKKIEDLVRELEEELERVAR

SEQ ID NO: 25465 - protein, 60 aa, Artificial Sequence
  Synthetic
SKEEKKKELEKKAREIKRRLEENKREYKEKVDRLKEELRRLLEEIREKVKRLEERIRRAI

SEQ ID NO: 25466 - protein, 56 aa, Artificial Sequence
  Synthetic
KDLVKELEDVLKELLDLLREILKTVKRVNEDSVRSAEKLIEDLERMIRELLKEARK

SEQ ID NO: 25467 - protein, 56 aa, Artificial Sequence
  Synthetic
DERERIEEDLKRLRDTLDTKEEESRRRIRELEEDLKRKIEESRRRIEKLKRRMEED

SEQ ID NO: 25468 - protein, 55 aa, Artificial Sequence
  Synthetic
EILDRLRKVLEELARRDRKILEDLERAVRELDKLDRDILRTLLRVAEELLRRREK

SEQ ID NO: 25469 - protein, 61 aa, Artificial Sequence
  Synthetic
DKLEEILKLLKEVIKTLLRLSEDLNRLNRELVRTVLELLKRVVELLKRVLEEVRKKVRDAN

SEQ ID NO: 25470 - protein, 59 aa, Artificial Sequence
  Synthetic
DKVERDVRRIKEKIKRILDDLRRRVEELKKKNKEDLEKYDEDIRRLEEEIKRLLEEARR

SEQ ID NO: 25471 - protein, 56 aa, Artificial Sequence
  Synthetic
REEKELLDEIRKRVKESEDRLEKLLRDYEKELRRLEKELRDLKRRIEEKLEELRRR

SEQ ID NO: 25472 - protein, 56 aa, Artificial Sequence
  Synthetic
KDALSRLLEELLRVVDDLIRVLKELIDKSRKVIEELLELLKRINEENLKVLAEIIK

SEQ ID NO: 25473 - protein, 59 aa, Artificial Sequence
  Synthetic
SRKEKLLKESEEEVRRLRRTLEELLRKYREVLERLRKELREIEERVRDVVRRLKEVLDR

SEQ ID NO: 25474 - protein, 56 aa, Artificial Sequence
  Synthetic
ERLVKTLIEDVERVIKRILELITRVAEDNERVLERIIRELTDNLERHLKIVREIVK

SEQ ID NO: 25475 - protein, 61 aa, Artificial Sequence
  Synthetic
SEKEKLREIIKRHLRSVEEVLRLLAKILKDLTDASEENLRLLKELLRRLLEVIRKLVEDVK

SEQ ID NO: 25476 - protein, 56 aa, Artificial Sequence
  Synthetic
EDALRKLKKKLEEIEKTVKDSIDKLRELLEELERRVRKIAEENKRLLEELVREVKK

SEQ ID NO: 25477 - protein, 60 aa, Artificial Sequence
  Synthetic
KDEERLEDELRELTERMREKLKEHEERVRELSKEVKRKAEDSEEKLKKDLKEVEDTLRKK

SEQ ID NO: 25478 - protein, 55 aa, Artificial Sequence
  Synthetic
EELLERIERIIRTSKKLLTEALEIIREIIKRSKDSNRDLHRDLEAILRRIEEAKK

SEQ ID NO: 25479 - protein, 61 aa, Artificial Sequence
  Synthetic
SDEERLVAELERLIEISLRILEELLEVLRRLVEESLRLLEELVKVAEEIIERLLRLLEETV

SEQ ID NO: 25480 - protein, 55 aa, Artificial Sequence
  Synthetic
ERLKKTADEIKKRLDKVRKDSDDLAEEIKRILKRVEDESRDTARKVKKVLEDAKR

SEQ ID NO: 25481 - protein, 59 aa, Artificial Sequence
  Synthetic
SKEDEVLERLKRAIERSIKIVEEIVKRNVETNERSERILRELAETLRRVLDTIRKLLED

SEQ ID NO: 25482 - protein, 56 aa, Artificial Sequence
  Synthetic
EEELKRRLEEIERKLKEVLDRLKKKHDDDNKENKDVLDEVRKRHKELLDKLREKRK

SEQ ID NO: 25483 - protein, 57 aa, Artificial Sequence
  Synthetic
DEEEKVLRILEELLKEHKRVLEELLELVRRIIERHKEVLKRVLKLVEDLIRRIKEAN

SEQ ID NO: 25484 - protein, 56 aa, Artificial Sequence
  Synthetic
EEAAKEVEKRLEEVKTDLRRLARESEETLRRVEERLEELKERSERELKRVEEEIRR

SEQ ID NO: 25485 - protein, 56 aa, Artificial Sequence
  Synthetic
SEEEELKRILDENHESLKDLLREIKEILRANHETVKKLLETIKEILDTVLKILRDV

SEQ ID NO: 25486 - protein, 55 aa, Artificial Sequence
  Synthetic
EELLETLKRLIRELVKRLEKILDDDRKLIDRLVRRLEEILKEDKRRIEEALERLR

SEQ ID NO: 25487 - protein, 60 aa, Artificial Sequence
  Synthetic
SELERAEELIKKLLKLHEDVLRRLTEVDDELLEIHDRVLKRLKEVDDELLKLIRDMLRRA

SEQ ID NO: 25488 - protein, 58 aa, Artificial Sequence
  Synthetic
EEAKDIREKLERLLRKSEELVRKSLKELKELLDKSKKLLEDSKRRLEEILKEIKDDSR

SEQ ID NO: 25489 - protein, 60 aa, Artificial Sequence
  Synthetic
DEEDEVEKLIREAIELNKRILEEIKELIERIVRRNKEILREAKEAIERLIKIARDLTKDK

SEQ ID NO: 25490 - protein, 56 aa, Artificial Sequence
  Synthetic
EEKLERIARELKKLLEEVERRSRKAIEDLKRELKRVMDRSREAERKLRELLKETKR

SEQ ID NO: 25491 - protein, 58 aa, Artificial Sequence
  Synthetic
SEDEVLKKIEDELREVEKKLEDVLREIKRRHDELKKRLDEKLERLRRRHEELKEALDR

SEQ ID NO: 25492 - protein, 60 aa, Artificial Sequence
  Synthetic
EEEVKRDLKRILDRLLEVNTKSIEDLKRILDKLLEVNRRNVDEIRRILDELRKVIERVTK

SEQ ID NO: 25493 - protein, 60 aa, Artificial Sequence
  Synthetic
DETERVKEVLDRSLKLNEDLLRKIDEILKRLFEINKEVIDIIRELLERLVRIAREVLEKN

SEQ ID NO: 25494 - protein, 55 aa, Artificial Sequence
  Synthetic
EEVEKRIKKLLDDLEKVAREIRKKHKELLEELEKVAREVMDAHRRLLEDLKRTDD

SEQ ID NO: 25495 - protein, 59 aa, Artificial Sequence
  Synthetic
SLKEIVKEIIDRASELLKRLLERSEDSLRTASELLRKILEDSRRSLRTIARLLEELLRT

SEQ ID NO: 25496 - protein, 55 aa, Artificial Sequence
  Synthetic
REIEKEIRRILEELKRKHDEIEKKIRELEREIKRKHEELEDRIRKIERDLDRRTK

SEQ ID NO: 25497 - protein, 58 aa, Artificial Sequence
  Synthetic
SLRELVEKILRDAAKLIERLLKLSEEVLKRIEELLEELLRLSERSLRELLRLLEELLR

SEQ ID NO: 25498 - protein, 55 aa, Artificial Sequence
  Synthetic
KDIKKELDDIVRDVKRKHDKLREELKKIVEDAERAHRDIDRKIREILKELKERTD

SEQ ID NO: 25499 - protein, 57 aa, Artificial Sequence
  Synthetic
REEELRKKIEDELRDLKRKLEDLLRRYEEKLREAEKKLKDLLRRYEERVREIKKELS

SEQ ID NO: 25500 - protein, 60 aa, Artificial Sequence
  Synthetic
EDELLRVLEKVIEDNLRIVEELIRRLEEVLKRHEDLVRTLLDLLKRVLEAVKKLLDEAVT

SEQ ID NO: 25501 - protein, 60 aa, Artificial Sequence
  Synthetic
SSEELLKRIVDEDERVLEEWRRVLEEIKDLSKRVVDLLDKVLKEIEKIVDEVTRRLERDG

SEQ ID NO: 25502 - protein, 55 aa, Artificial Sequence
  Synthetic
KDLLETIKKRVEEIRRTLEKIKRDYDKAIEEIRRKLERKLEEYKEVIDDLRRKTK

SEQ ID NO: 25503 - protein, 59 aa, Artificial Sequence
  Synthetic
SSDELLEEIIKEIARLIEELLEILRENLERSEESLRRVLRAIDDNLRRVERLIEALARG

SEQ ID NO: 25504 - protein, 56 aa, Artificial Sequence
  Synthetic
KKAMDEELEKIRRDHERLKKEIEDRLRELKDKHRRAFEELKKMLDDIKRKVDEAKR

SEQ ID NO: 25505 - protein, 59 aa, Artificial Sequence
  Synthetic
DEEEILREILRVAEELSRLNEEVNKRVLEVLERLSRMNEKLLKEVKDVVDRLIELRRRK

SEQ ID NO: 25506 - protein, 60 aa, Artificial Sequence
  Synthetic
DKEVKRRIEKALRDIEELIERILRRNEEVKREIERLDEENRRRNKEALERIRRLIEETKR

SEQ ID NO: 25507 - protein, 59 aa, Artificial Sequence
  Synthetic
KDEEELKRRVEKVIRDLERKLKDLEEDHRRVLEELKRELEETKRRLDKVIEEIERVLRR

SEQ ID NO: 25508 - protein, 60 aa, Artificial Sequence
  Synthetic
KERLIRVLEEILRLVLRLHEEVVRLVRRLLEESHRILRKIVELLREILEDLKKILDDIRR

SEQ ID NO: 25509 - protein, 56 aa, Artificial Sequence
  Synthetic
DEEDEIRKRLKELLDDVKRRLDELRRESERLLKEVDDLLRESKKRLEDEKKKLEER

SEQ ID NO: 25510 - protein, 55 aa, Artificial Sequence
  Synthetic
KEVLERLEKIVRRNEEVNDEVRELVTRLNETSNRAARELLELAKRIIEEIKKAVK

SEQ ID NO: 25511 - protein, 57 aa, Artificial Sequence
  Synthetic
SKLETIKELLERLHELNERAVRELKKTLEDLHRDNARLIEELIRKNERLLEALREKV

SEQ ID NO: 25512 - protein, 55 aa, Artificial Sequence
  Synthetic
EDADRDVKRLKEESEELLRRSKKRADDLKREVERLLEESRRRLDELLKELKDRSK

SEQ ID NO: 25513 - protein, 61 aa, Artificial Sequence
  Synthetic
SRLEEIKKLLEKVMELIRRIAEELLRINEKVLEVLERIVRTILRLNEEHLKDVRDIARKLK

SEQ ID NO: 25514 - protein, 55 aa, Artificial Sequence
  Synthetic
TEIRKRLKELRDKNEELKKKVEEMIRRLEEESKKTKKRVEEILKRIEEEVREKAR

SEQ ID NO: 25515 - protein, 57 aa, Artificial Sequence
  Synthetic
SREETLRERIERIKRKSEEDVERIKRTLDREREENEETVRRIKETVDRLREEVEREL

SEQ ID NO: 25516 - protein, 58 aa, Artificial Sequence
  Synthetic
RELDRVEEIIRRIVKKLEEILRDLKRRAEDHIRRLTELIERSLKIVRDLAEDIRRAIE

SEQ ID NO: 25517 - protein, 59 aa, Artificial Sequence
  Synthetic
DADELLRRLAEEVERVIREAEDLLRRWKETIKKVLDDLKRLLDELKKRNEDVIRELTKT

SEQ ID NO: 25518 - protein, 56 aa, Artificial Sequence
  Synthetic
KDDLEDILRKNLDRLRKLLERLREILRENLEALKKTLKRLEDVVREILEDLKRERK

SEQ ID NO: 25519 - protein, 59 aa, Artificial Sequence
  Synthetic
TEKELLEELEEDVKRVIEELERLLREWKEELRRVLEESERLLRELRERNKRELEDIRRI

SEQ ID NO: 25520 - protein, 56 aa, Artificial Sequence
  Synthetic
LEEVTRILERNLKELERNLRDLDRTVKTNERLLRELLKKLRDIVRTILELLERKTK

SEQ ID NO: 25521 - protein, 57 aa, Artificial Sequence
  Synthetic
SEKEDVRRKLEEDREKHERDLRRIEEELRRTIEESERRLKEVKKRLKELIDDVRRRD

SEQ ID NO: 25522 - protein, 60 aa, Artificial Sequence
  Synthetic
KEELKKAVETILEELVRIADKLIDIHREILEKLLRVAEKLLEVSRRALDKLKKLIDKTDK

SEQ ID NO: 25523 - protein, 56 aa, Artificial Sequence
  Synthetic
DKAEVLREALKLLKDLLEELIKIHEESLKRILDLIDTLVKVHEDALRKLKELLERS

SEQ ID NO: 25524 - protein, 55 aa, Artificial Sequence
  Synthetic
EEIDRELKRVVEELRRLHEEIKERLDDVARRSEEELRRIIKKLKEVVKEIRKKLK

SEQ ID NO: 25525 - protein, 59 aa, Artificial Sequence
  Synthetic
REKEEIERTLEELKRILDELVKDDKKSLDRLREIMERSVRIAEETLRKLRETLELKARG

SEQ ID NO: 25526 - protein, 56 aa, Artificial Sequence
  Synthetic
KDEVLKRLDDLIKEWRDVLEKLLRDLRELLERSKKRLRKVREDLKRLLEELERRAD

SEQ ID NO: 25527 - protein, 56 aa, Artificial Sequence
  Synthetic
STREKAKKVLDTLRRDNEDMKRVVEKILRALKRTNERAEKLAREITEEIKRILKEV

SEQ ID NO: 25528 - protein, 56 aa, Artificial Sequence
  Synthetic
EDLLRKLEEELRRIKEKLRKALEELEREHRELEKELDKLHDESRKEHERIEEELRR

SEQ ID NO: 25529 - protein, 60 aa, Artificial Sequence
  Synthetic
DKERVLEDVKRRAKELEELLKEVEDRYEEDLRRIEETLKDTERRYREKLEKIKEELKRTV

SEQ ID NO: 25530 - protein, 59 aa, Artificial Sequence
  Synthetic
EKIKRIVEKIIKEHRDVLERLKRIIEEITRSDRESLERLKEILKELIRILKELADRERK

SEQ ID NO: 25531 - protein, 60 aa, Artificial Sequence
  Synthetic
KSEDVVRELIKLHRELNDKARKVIETILERNRELVETAERVIRRLIKLLEDALRILKKSS

SEQ ID NO: 25532 - protein, 56 aa, Artificial Sequence
  Synthetic
EEELRRLEEEIRDIVRRLRKRVEEYRKELEDLEKELADEVKKYEDEVKRIREELRK

SEQ ID NO: 25533 - protein, 60 aa, Artificial Sequence
  Synthetic
STEELLREIEEIIRRILEIADKTSKEWADLIKRILELIKRNLEELRKLVREVLEEVRKEG

SEQ ID NO: 25534 - protein, 56 aa, Artificial Sequence
  Synthetic
KDTIDKLRKRLKEIKDRTKELLDRIREEIRELRERNKEIVKDIERRLRELKDRIRK

SEQ ID NO: 25535 - protein, 57 aa, Artificial Sequence
  Synthetic
SKKELVREVVKELHELNKDVLRVLTEIVERVKELDKRVLEVLRRIVEEVERLAKEAG

SEQ ID NO: 25536 - protein, 59 aa, Artificial Sequence
  Synthetic
KDRLREIEERVRKILEEIDKLLDDLRKAYDRILERIERLVRELSRKHKEVADKITELVK

SEQ ID NO: 25537 - protein, 60 aa, Artificial Sequence
  Synthetic
SEDERVTRLKEELERLLDELRKRYEKLREEIRRVLEDLKKKYDELKEELDKMLRDLERRG

SEQ ID NO: 25538 - protein, 55 aa, Artificial Sequence
  Synthetic
EELLRELERVSREDERLVKEAADELRRILDTDRKLLKEVVDTLERVLRRILKETR

SEQ ID NO: 25539 - protein, 61 aa, Artificial Sequence
  Synthetic
SEEERVEELLRRIEKLLKESEEDVERLKKRHEEENRRLKEEVKRLMDELREILRRLEEETG

SEQ ID NO: 25540 - protein, 58 aa, Artificial Sequence
  Synthetic
KDVDKLVEVLDRVLRRVRELLEELAETNRESIRRYERLSEKNAELVTEIIERLRRTVK

SEQ ID NO: 25541 - protein, 56 aa, Artificial Sequence
  Synthetic
SKMEKLLKDLREALEKVKRRYEELERRLDEVLKEHEEIVKRLLEELEKVLKRIEEG

SEQ ID NO: 25542 - protein, 59 aa, Artificial Sequence
  Synthetic
ERVEELIERLIRIIERLLREVIKSHEKLVRTIERLIEESIRVNEELLEVIERLLDRARK

SEQ ID NO: 25543 - protein, 57 aa, Artificial Sequence
  Synthetic
DLERVVEDIVDKAKRLLDKNLEVLKRIVDEVLRLLERLLRESRKVVKRVKEIIEELV

SEQ ID NO: 25544 - protein, 59 aa, Artificial Sequence
  Synthetic
KDLLTELEKKLRKLKRDSEKVVDDLKKELERIKREVKRLIEENRRTLKDIKRAVDEARK

SEQ ID NO: 25545 - protein, 57 aa, Artificial Sequence
  Synthetic
DEDELVEEIERRLREIEKRLRDVMEESKRRLEEILRELKRIIDESRKRLDDLRRRLK

SEQ ID NO: 25546 - protein, 59 aa, Artificial Sequence
  Synthetic
ERIEKILEEILRLSRESLRKLKKILEELLKVSEDSLRDLIRILEDLLRLLKDLLEKLKK

SEQ ID NO: 25547 - protein, 59 aa, Artificial Sequence
  Synthetic
SEDEELEDLKRKLRRALERYEDRLREIKRRLDEKLKEIKRDYDRLKKELDDLLREIERR

SEQ ID NO: 25548 - protein, 55 aa, Artificial Sequence
  Synthetic
EVVKELLDLVREIIKRLKEIHEEILRLIETVLEDLERANRRLLDLARKILEDARK

SEQ ID NO: 25549 - protein, 60 aa, Artificial Sequence
  Synthetic
SKEEKLEDLIRRIKERLEEALRRNKKTADEIRKELKKATDRNRKRAKELRERLREVLRRT

SEQ ID NO: 25550 - protein, 55 aa, Artificial Sequence
  Synthetic
EVVEELLRLLEELLEHNREVIEKLVDLIRELLRHDKEVTEEILRLIEELLKEVEK

SEQ ID NO: 25551 - protein, 56 aa, Artificial Sequence
  Synthetic
SERELIERWLELHKEILRLIRELVERLLKLHREILDTIKKLIRELLELLEDIARKL

SEQ ID NO: 25552 - protein, 59 aa, Artificial Sequence
  Synthetic
DDERRTLTELLKRMEDILEKVERTLKKLLDDSKRMAEEVKKTLKELLERSEKVAEDVRK

SEQ ID NO: 25553 - protein, 60 aa, Artificial Sequence
  Synthetic
SEDELIRRIREELKRLEKEHEDMVRELEKKHKKLKEELDRAIEEIERRLRELKERVEREG

SEQ ID NO: 25554 - protein, 55 aa, Artificial Sequence
  Synthetic
DELVKEIKRLLEELLRLLERLVRSSRRLNEELLRLSEKLIRDAERLARELLEAAR

SEQ ID NO: 25555 - protein, 56 aa, Artificial Sequence
  Synthetic
KKEEDLRREVEEVKEEIRELIERSRESVRRILKEIKDLIRKSKESIDKILEDLKRK

SEQ ID NO: 25556 - protein, 59 aa, Artificial Sequence
  Synthetic
EEVLRVVEELLKLLKEHLEENVRILRRILELLRRHHDTNRKIVKRILELLRRVLESIRK

SEQ ID NO: 25557 - protein, 60 aa, Artificial Sequence
  Synthetic
SVEEILRELLRVLEEILKRIADINEKLLRVSRKIVEDLKRLLDEALRVLRRAVEEIEKEG

SEQ ID NO: 25558 - protein, 58 aa, Artificial Sequence
  Synthetic
ERLREILEELERVLEKVMRDLRRILREYEEVLKEAREEYRKILEELRKVLKEVDDRLR

SEQ ID NO: 25559 - protein, 57 aa, Artificial Sequence
  Synthetic
SELEKIDRLLEKVLRENKRALDELVRLLEELIKTNRDALEKLREINERNIERLREEV

SEQ ID NO: 25560 - protein, 59 aa, Artificial Sequence
  Synthetic
KKVLEDLERHLEESKKTVERLVRELRKTHRKVEEDVKRLIEELRRLHEELRKRLEDDDR

SEQ ID NO: 25561 - protein, 56 aa, Artificial Sequence
  Synthetic
REKEELIKLIRDILEKLREHSRTIVELLETILRVVREHSKRIEKLLRELLDILRRQ

SEQ ID NO: 25562 - protein, 60 aa, Artificial Sequence
  Synthetic
EKEVEDLLRKAVEDIEKLIRENEKLLEDVLRTIRKLIRENEELLRDIVEKIKRLADEARK

SEQ ID NO: 25563 - protein, 59 aa, Artificial Sequence
  Synthetic
SEEEEVKKVVDEIKKVLDELRKANEDSARRLREVLEELRKRNEESKKEVKDLLEELKRV

SEQ ID NO: 25564 - protein, 60 aa, Artificial Sequence
  Synthetic
TDTKVKELIEIVDELLEIDDRILEEIERTVRKVIDLNRKVLEDIEELVKEAIKVLEEIAK

SEQ ID NO: 25565 - protein, 59 aa, Artificial Sequence
  Synthetic
DEEEELRELKERIERTIEKLKEDTKKLKKELEDRIRELKRKTKELLDDMKRLIKEVKDK

SEQ ID NO: 25566 - protein, 55 aa, Artificial Sequence
  Synthetic
EDIIRLVRDLIRLNREHLRDLEEAVREIIKLLREHLERLERVVDRMIRELRKAAK

SEQ ID NO: 25567 - protein, 57 aa, Artificial Sequence
  Synthetic
SEEEELDKLRRELEELAKESTREVKELLRELREMLERHKKRLKEIKDKLDEDIKRED

SEQ ID NO: 25568 - protein, 58 aa, Artificial Sequence
  Synthetic
DELERLKDLLRTLIKKLEDLLENLRRLVERVIESLRRLVEKDEEINKRTIKELRRAIE

SEQ ID NO: 25569 - protein, 60 aa, Artificial Sequence
  Synthetic
DEERIVDKILKVIRESAEALRKIVEDVLRVLEELMRRHKKNVEELDTIVEDLLRKVRERV

SEQ ID NO: 25570 - protein, 56 aa, Artificial Sequence
  Synthetic
EEVLREARRRIREVERHNKKVHDDARKRLRDLVEELKRLHRELEEKLRRIIEEIDR

SEQ ID NO: 25571 - protein, 61 aa, Artificial Sequence
  Synthetic
SEDEKVRKLLRDLAEEIKRLLETYDRKLKEIAKRIEDTLREYRERLEELKRRLEELVRKKN

SEQ ID NO: 25572 - protein, 59 aa, Artificial Sequence
  Synthetic
EELVREIRRTLETILRLNEELLKRIRDVLREIIELNREVIERLREILERLADLIRRRAE

SEQ ID NO: 25573 - protein, 60 aa, Artificial Sequence
  Synthetic
SELEKLARLLEEILELLRELHRKTAEALKEILELLDRHLDDLRRAVKEILEDLDKDLEDE

SEQ ID NO: 25574 - protein, 56 aa, Artificial Sequence
  Synthetic
DDKAKKVREKLEELLRRLKEKNDDLRRKLERLARELEKLHEEVKKRLKELEDEARR

SEQ ID NO: 25575 - protein, 60 aa, Artificial Sequence
  Synthetic
RELEKLAEVLERIVRALETHLKLIADVLREILRLLDEHLKIIKKVVRDILRELDEVLRRR

SEQ ID NO: 25576 - protein, 56 aa, Artificial Sequence
  Synthetic
SDTLEKLRRRLEDRRRKLKEANDRVREVLDRLRKELEEIDKRLEDVLKKLREDLER

SEQ ID NO: 25577 - protein, 60 aa, Artificial Sequence
  Synthetic
SKKELLEEVVRRAIELLKRHLEKLKRILEEIVRLLEEHLEKVERVLEAILRLLDDLLRRV

SEQ ID NO: 25578 - protein, 56 aa, Artificial Sequence
  Synthetic
KDKLKEIEDELRRLLEELRRLDKKIKDRLRELKKDLDEANRRIKETLKKLLREVEK

SEQ ID NO: 25579 - protein, 56 aa, Artificial Sequence
  Synthetic
SDLEELEKLIRRLLKINEDLIRIIEDLIRKSLTLLKRIVDLIRELIREIEEIIRRT

SEQ ID NO: 25580 - protein, 55 aa, Artificial Sequence
  Synthetic
EEIRKRVRDLEEKVKKLLRDLEEESRRVAEKVEEDLKRVEEESRRTAREVEEKER

SEQ ID NO: 25581 - protein, 60 aa, Artificial Sequence
  Synthetic
SKEERADELLKDLERKVDKLRREHEELLKELKRKVDELRKEHKKLLDTLREEVRRIEEKV

SEQ ID NO: 25582 - protein, 59 aa, Artificial Sequence
  Synthetic
EDVLREITRLLEKAKRIIEESLREITELVKEIEKIIKESLDAARRLLEEIKKILEELAR

SEQ ID NO: 25583 - protein, 59 aa, Artificial Sequence
  Synthetic
SIEELARKLVKENRRLATEANKILKDIVKTNRDSIRKVREILKELVERLRDLIRKVRRD

SEQ ID NO: 25584 - protein, 55 aa, Artificial Sequence
  Synthetic
EDLKRELERAKRELERLLRELDEEHERMKKKVKDEIRRLKKESEEVKKEVKDTED

SEQ ID NO: 25585 - protein, 59 aa, Artificial Sequence
  Synthetic
DEEEITRKLEETIRRLEEEIDKIIKDLLRMLEENNKEIKKVIEKVLETSRRILSALARN

SEQ ID NO: 25586 - protein, 56 aa, Artificial Sequence
  Synthetic
EEVLREAEKRIRDSAEEVKRILEEHKERLRELVKKLERVKETVRKKIEELREEAKR

SEQ ID NO: 25587 - protein, 56 aa, Artificial Sequence
  Synthetic
SELEKDLKDAEEIIKELEEINKRLLEEIRRIVERITKINRDLLETVKRLIEELIKE

SEQ ID NO: 25588 - protein, 56 aa, Artificial Sequence
  Synthetic
EERLKEIEERIRRTEEDVKRKHDDVRRELDEEDDRYKRELDKVRKKLKEKADRIRD

SEQ ID NO: 25589 - protein, 56 aa, Artificial Sequence
  Synthetic
SKLEDLLRKVEEIIKEIERINEELLKRVAEIVETLLRENKKLLEEIKEILKRLIED

SEQ ID NO: 25590 - protein, 56 aa, Artificial Sequence
  Synthetic
ERKLDKIRKDLERVVREYEEKLKEVRKRLRELVERVKEKHKRIEEELRKTAKEVRD

SEQ ID NO: 25591 - protein, 59 aa, Artificial Sequence
  Synthetic
SSKELVEKLKELIKDHLRVADEVIKKLEELIRRHLRKVEEIARRLEELIRELADELRRA

SEQ ID NO: 25592 - protein, 55 aa, Artificial Sequence
  Synthetic
RRLDRLEEKVEKDLRKLARELEDVNRRLEEELRRLEKRSEDLNRRIREEIKKDAK

SEQ ID NO: 25593 - protein, 61 aa, Artificial Sequence
  Synthetic
KDDEILRKLLEILERLLKLSEEVLRELLRLLEELLRLSKESLKRLSRLLEEALKTLVEEEG

SEQ ID NO: 25594 - protein, 59 aa, Artificial Sequence
  Synthetic
ERLKAVVDRIEKAIKKVTEDSRRLVKRIETELRELVKRSKDLAREVEKRLKEVVEEAKR

SEQ ID NO: 25595 - protein, 59 aa, Artificial Sequence
  Synthetic
SDLERILDKVTKLAEDAKKLAKKSVDLHRDNIRRLKTTLKRILESLRKAIKRLKDALRR

SEQ ID NO: 25596 - protein, 55 aa, Artificial Sequence
  Synthetic
EELEELKRDLDRLFEKIRTDLKRLRDTNRKLFDDLRKEHEAVEDKVRRVAEELTK

SEQ ID NO: 25597 - protein, 56 aa, Artificial Sequence
  Synthetic
SEEDLVREVLRAIKRILELLTTLSKENLEVVKRIIEDLERVARENLRVIEEIIKKI

SEQ ID NO: 25598 - protein, 56 aa, Artificial Sequence
  Synthetic
ERIIEEIRRTATEVLKRNEAVVKKIRELIKRVTERNRKVLEEIKELVKRIKDELRR

SEQ ID NO: 25599 - protein, 56 aa, Artificial Sequence
  Synthetic
DKEREIDDIAEKLRRKYKKLREDLDRIEEELRERYERLKRKLDELARRLTKKARDE

SEQ ID NO: 25600 - protein, 55 aa, Artificial Sequence
  Synthetic
ERLEELLKEVVETLRRLLEELKRLSEEVLKKAKEVIDRIRRLSEEVVKSLRDAAK

SEQ ID NO: 25601 - protein, 61 aa, Artificial Sequence
  Synthetic
SEEEELDKLLKEYERVVREIEEKLDRVKRDIERLVEEITRDLRRVLEEYRKVVEELAKDEG

SEQ ID NO: 25602 - protein, 58 aa, Artificial Sequence
  Synthetic
DTARRIERLSREVIKKLEKALKELEDLVREVLRRLKEAVEEIHKLSRDVIKMLTDATR

SEQ ID NO: 25603 - protein, 59 aa, Artificial Sequence
  Synthetic
DDEERLKKVKEEIEEKAKRLKEDLERALKRYEDIIKKLEDDNRKVLERIRRKVEELKKN

SEQ ID NO: 25604 - protein, 60 aa, Artificial Sequence
  Synthetic
DELIRKALEELLRIAEEILRRDLRLLEENRRVVKESLDVLAELLERLLELLERILREVRK

SEQ ID NO: 25605 - protein, 60 aa, Artificial Sequence
  Synthetic
SERDVLRELLERIKKLLETLIRIVEELVRRSEETIKRLAELNRRLIEEIRRIVEEVKKDV

SEQ ID NO: 25606 - protein, 55 aa, Artificial Sequence
  Synthetic
EEVKKRVEELRREYRETLKRLRDESEKIAEELKRLLDELRRRLEELARELRERTK

SEQ ID NO: 25607 - protein, 58 aa, Artificial Sequence
  Synthetic
TEEEIIKEIVKLLRDLARLHEEVDRTNKRLLDELVRLHREVDERLTRLAEDLIRLAEK

SEQ ID NO: 25608 - protein, 56 aa, Artificial Sequence
  Synthetic
RKDLRKVVEELRRRIEELNRRHDKLAEDLRREIEELNKEHKRMLRELEKKIEDDRR

SEQ ID NO: 25609 - protein, 57 aa, Artificial Sequence
  Synthetic
DAEEILKEIHEIDKRTIDEIRKILKKLLEADKKSIDDIRRILKKLLEIVKRLIDLLR

SEQ ID NO: 25610 - protein, 56 aa, Artificial Sequence
  Synthetic
DKTLKKILDELRRKVKETDDRLRKLHEDLKRKVKELIDRLERLNEDIARLLKETRD

SEQ ID NO: 25611 - protein, 57 aa, Artificial Sequence
  Synthetic
KTEELLRELIKVLKETLDRLKRVLEKLAETNDKSLKELLKLLEELLKAIRDVLRRIL

SEQ ID NO: 25612 - protein, 55 aa, Artificial Sequence
  Synthetic
DEVVEELEKVARELADKLRRVLKESEDVVKRVKDELREVLDRSKKVLEELKKKRK

SEQ ID NO: 25613 - protein, 58 aa, Artificial Sequence
  Synthetic
SKEELVKEIDELNKRVNDLLEELLRKSEKLHKEILELLERLLREIIKLLRRILEIVER

SEQ ID NO: 25614 - protein, 56 aa, Artificial Sequence
  Synthetic
EDELRRLLEDIERKIERLLRELKKESEEIRKRIRELLEDNRDKSRKIKKAIEELKK

SEQ ID NO: 25615 - protein, 56 aa, Artificial Sequence
  Synthetic
KLEDAARIAAKAAEEWAEAHKRAAKINAEASEEWAKAHREAAKIAAEAAKRAADEA

SEQ ID NO: 25616 - protein, 55 aa, Artificial Sequence
  Synthetic
EDALRVIEKAAEDAERAAKESLDVAERALRESEKAAKESLEVLERALRDAKRAAD

SEQ ID NO: 25617 - protein, 55 aa, Artificial Sequence
  Synthetic
SALETAAKLAKEAADRWLEASKRAAELAKDAADKWLDASRRAAELAKKAAKEALD

SEQ ID NO: 25618 - protein, 60 aa, Artificial Sequence
  Synthetic
DTDLKRRAAKAAEDIKKAADELLKKSEDAAREIKEAADKLLEDSKRAAEEIKRAADEITR

SEQ ID NO: 25619 - protein, 57 aa, Artificial Sequence
  Synthetic
DEAEKLAKEAREAIKRYADASEKIAKEAREAIKKYLEASKRIAKELREALKELARRL

SEQ ID NO: 25620 - protein, 56 aa, Artificial Sequence
  Synthetic
KDAVREADEAAERAREKLERLSREAKKAAKDAKDKLKRLSDEAKKVARRLIEELKR

SEQ ID NO: 25621 - protein, 58 aa, Artificial Sequence
  Synthetic
SKDEKAIEALKRAADETRKAAEKSADAARRAAEKSEKAAREAAEALKRAVEEAARALG

SEQ ID NO: 25622 - protein, 55 aa, Artificial Sequence
  Synthetic
EAVLRAAEKAIKAAEEAARANKKAADEAIRANEEAAEANKRAADKAIKAIRDAAR

SEQ ID NO: 25623 - protein, 58 aa, Artificial Sequence
  Synthetic
DREDAARRVEKAAREIAEKNKKAARDIKELAKEAIKRTKEAAERVKRAAKRIAEAAEE

SEQ ID NO: 25624 - protein, 56 aa, Artificial Sequence
  Synthetic
KDAVKRALEELARAAEEAARADAEAAKKLAEAAERAARANIKALRDLAKAAKDAAR

SEQ ID NO: 25625 - protein, 60 aa, Artificial Sequence
  Synthetic
REEEAAREAAEAARRAAEIAIKANEEAARAAKRAAEISIKASEDAARAAEEAAKEAARSN

SEQ ID NO: 25626 - protein, 59 aa, Artificial Sequence
  Synthetic
EDALRRAKKAIEDAIKVLKEALDKSAKAIEEAIRVAKEANERSAKAIKDAIEVAERAAR

SEQ ID NO: 25627 - protein, 59 aa, Artificial Sequence
  Synthetic
SEAETLVERLKRLSERDERAARRLVEELKRLAEEDKRAAEELARRLEELARRAEDVARA

SEQ ID NO: 25628 - protein, 116 aa, Artificial Sequence
  Synthetic
EEAARAIKLAREAAKRAIDASKESADAAERAAKEAIKASKRSAELAEEAAREAIKALKDAAEEAAKRLRRAAEEALKINKRANEELERAAREALDLNRRANEDLEKAAEDALRTAK

SEQ ID NO: 25629 - protein, 59 aa, Artificial Sequence
  Synthetic
REAEELVKRLKELAEKDRRAAKRLVEEAEKIIRRARELSKKTVKKLEDLIERAKRLADA

SEQ ID NO: 25630 - protein, 56 aa, Artificial Sequence
  Synthetic
AEDAARRAEEAARRALKINEDAAREAERAAREALKINDEANKRLEEAARRALETAR

SEQ ID NO: 25631 - protein, 60 aa, Artificial Sequence
  Synthetic
KELEEILKTVEDLVRRAKELLRRIHEINRESIEDIRRLLKEIHDTNKRSIEKVDELLKRK

SEQ ID NO: 25632 - protein, 56 aa, Artificial Sequence
  Synthetic
ETEIRKILKESNDRLTEVIKEVEKVLRESDELLRDALKKIVDVLREVLKRLEDTVR

SEQ ID NO: 25633 - protein, 59 aa, Artificial Sequence
  Synthetic
EKEKEIKDAEDEARKAAEESKRKIDKADEDAKKALEELERSIREADKDAKRALDEERRE

SEQ ID NO: 25634 - protein, 57 aa, Artificial Sequence
  Synthetic
REDAARIAAKAAKDALKANEEAARILARAAKEALKILEDATRILKEAADRALDILRK

SEQ ID NO: 25635 - protein, 60 aa, Artificial Sequence
  Synthetic
SEVEEIEKVARRNLELIKRLLEKAERVAKKSLDLIKKAADDARRIAEETLKLIREAAEAG

SEQ ID NO: 25636 - protein, 62 aa, Artificial Sequence
  Synthetic
KEAEDLLREAAKRAEELIRRAEEAAKRLKEEWERLIRELKRALEEYAKEAKKLIKELEDRTR

SEQ ID NO: 25637 - protein, 62 aa, Artificial Sequence
  Synthetic
SKREEAEKAARRAEKLAREAREAARRSLERAKDLARRHEKLSRELLEEAKRLAEEVKETAKK

SEQ ID NO: 25638 - protein, 56 aa, Artificial Sequence
  Synthetic
IDEALKALKRAADLSADANRRALEALEKAARLSARAAEEALEALRRAAELARRAAE

SEQ ID NO: 25639 - protein, 57 aa, Artificial Sequence
  Synthetic
SAEDIIRESEKADKDALDEWRRLIKKLEDLIEELLKENERLIRKLEELIKKALEADK

SEQ ID NO: 25640 - protein, 56 aa, Artificial Sequence
  Synthetic
GEEAAERAKRAADEAKKASDEAAKEAREAAERALRAAEEAAKEAEKANRDALRSAK

SEQ ID NO: 25641 - protein, 61 aa, Artificial Sequence
  Synthetic
SEDEELAKEAKRAVEEAKKRLEDLLRRAEEAHRRAKKELDELARRAEEAHKKAKRDIDRDA

SEQ ID NO: 25642 - protein, 62 aa, Artificial Sequence
  Synthetic
EEIVRRADELAKRAEELNRRLAEEADKIAKKAKDLNERLLREARDIARRAKELIKRLLDARR

SEQ ID NO: 25643 - protein, 56 aa, Artificial Sequence
  Synthetic
SKAERVVDEARKTDEEVLREAEKVNRKVEEVIRRVLKRNEDVNREIARAIERVLRG

SEQ ID NO: 25644 - protein, 59 aa, Artificial Sequence
  Synthetic
EEVLRTAEEVVREALRLVTDAHRVNEEVIRDVLRLVERVHRVYEEVNRRNDELLKELTD

SEQ ID NO: 25645 - protein, 58 aa, Artificial Sequence
  Synthetic
KDEERLREILKKYKEDSERILREVREILERYRRAIEEILKRLEDILRKLEEDVRRELK

SEQ ID NO: 25646 - protein, 55 aa, Artificial Sequence
  Synthetic
TKALKTVRDVLELLRKILEEVRRLNEKLLEELKRLLDEVVEKNERLIKLLEKDAE

SEQ ID NO: 25647 - protein, 57 aa, Artificial Sequence
  Synthetic
DELETLEDVLRKIEDLLRRWLEKLEETLKRIIRLLETSLKLLEESIRRILRILERDV

SEQ ID NO: 25648 - protein, 58 aa, Artificial Sequence
  Synthetic
KKVRDVLREIEELLERHKRLLEKLARELRELAKRHREEIKKVLETLKKLAEELTRRVR

SEQ ID NO: 25649 - protein, 60 aa, Artificial Sequence
  Synthetic
SEKEELRRELEEHAKRSRDTVKRLEDENRRVLESLKRKVDTLRRINEETLREIRRLAREE

SEQ ID NO: 25650 - protein, 55 aa, Artificial Sequence
  Synthetic
EKLKRDLEDLKRKHDELRKRLKEELDELRRKHEKIKEELDRHLKELEDKLREARR

SEQ ID NO: 25651 - protein, 60 aa, Artificial Sequence
  Synthetic
SEKEKLTEILRRHERESERVVKELDEENKRHLKKSREIADTLRKLNEETLERIRELVKRA

SEQ ID NO: 25652 - protein, 55 aa, Artificial Sequence
  Synthetic
ETLKRELERLKEEHERLKEELDRHLKALEEKHREIRREIDEHLKELKRRLDEERR

SEQ ID NO: 25653 - protein, 60 aa, Artificial Sequence
  Synthetic
SEKEKLIEDLRRILKETEERLKRVKERLRELLDEYRRRSEDKLRELKKELEEEEEKIRRS

SEQ ID NO: 25654 - protein, 62 aa, Artificial Sequence
  Synthetic
DRLRKRIKETADRLREMLKRHRELLERSMELLRRALEEAKKVLDETEETARRLLKLAEDEER

SEQ ID NO: 25655 - protein, 60 aa, Artificial Sequence
  Synthetic
KEIEETLKELEDLNREMVETNRRVLEETRRLNKETVDRVKATLDELRKMLKKLVDDVRKE

SEQ ID NO: 25656 - protein, 55 aa, Artificial Sequence
  Synthetic
KKVEELEKALEEIKRRLKEVIDRYEDELRKLRKEYKEKIDKYERKLEEIERRERT

SEQ ID NO: 25657 - protein, 57 aa, Artificial Sequence
  Synthetic
SEEEDREREYEERHKKAEEDLRRAEEEYARELRREEERLKEEAKRLEKELRDARTKL

SEQ ID NO: 25658 - protein, 59 aa, Artificial Sequence
  Synthetic
EKAKKALDEAVKRVKEDIKRLEDSVKTADDKDRKAIRRAEETVRTHIRTNEEAVRREEK

SEQ ID NO: 25659 - protein, 56 aa, Artificial Sequence
  Synthetic
SELEETLKRLKETNKRLLKKVKELVDESLRLNEELLRRLREVIRKIKETIKEVLEE

SEQ ID NO: 25660 - protein, 55 aa, Artificial Sequence
  Synthetic
ERVDELRKRIRKTEEEIEDIKRRYEKRVRELKETLDRIVKELRDRYKKIREEIDT

SEQ ID NO: 25661 - protein, 59 aa, Artificial Sequence
  Synthetic
DIEDVLKKVLEKNLRVLREVHEVNKRVLDEIVKLLRELHRVNKRVLEIILRLLEALRRG

SEQ ID NO: 25662 - protein, 56 aa, Artificial Sequence
  Synthetic
DEDLKRIEDELRRTLEEHRKRLREVERELEKKVEEHERELRKYEEETKRLLREAER

SEQ ID NO: 25663 - protein, 61 aa, Artificial Sequence
  Synthetic
REEERLRELITDYKRKLDDLKRRSEDLLREYEKTLEDIRRESERTKKELRESLKRDLDREG

SEQ ID NO: 25664 - protein, 55 aa, Artificial Sequence
  Synthetic
EKVKRELEKHTKLLKEILDTVRDLNRKHSEEIRRTVEEVRKANRRLLEELKETRK

SEQ ID NO: 25665 - protein, 60 aa, Artificial Sequence
  Synthetic
SELEETLKKIKELAEISRKLADETRREIKKLIDDSRKLLEDTHRTNEEMVRRVETKAKDK

SEQ ID NO: 25666 - protein, 59 aa, Artificial Sequence
  Synthetic
EEKLREVRELLERYREDVRRLKKEYEELLREEDKKVKKKKEDYERILRKTKKELDERRK

SEQ ID NO: 25667 - protein, 59 aa, Artificial Sequence
  Synthetic
SEDEKAAEDLKKLAEESIRELEKALRDAARLHEEALKRLKKALDEAARLAERAIEEARK

SEQ ID NO: 25668 - protein, 55 aa, Artificial Sequence
  Synthetic
EELIKLIEDLLRLAAELAKKIAELAERHLRLLEEAARKHIELVERLIELAKRDTD

SEQ ID NO: 25669 - protein, 60 aa, Artificial Sequence
  Synthetic
SEDEELEKLLEEAKKLIEESSRRLDELLEEDRRVVKRIEEEVEKLLKEVKEEIDKIKKEV

SEQ ID NO: 25670 - protein, 54 aa, Artificial Sequence
  Synthetic
KVLEIVKEIIDRIRKLLKKTFDISDELLRKWEDLLRRNNDLSRRLLKEAEDKAR

SEQ ID NO: 25671 - protein, 60 aa, Artificial Sequence
  Synthetic
SEKEDLARKLRKLVEELTREYEELVKKLERLIEEIEKVSEESVRKLEKLLREISEEVRKL

SEQ ID NO: 25672 - protein, 59 aa, Artificial Sequence
  Synthetic
DELLRKLVELLVEVLRRLIRVNRELVKLLREVLERLLRILRESVKKLKRLIEKVIKDET

SEQ ID NO: 25673 - protein, 57 aa, Artificial Sequence
  Synthetic
KEEEDLLERVKRVLDELIEIVDRNHELNRRVVETSARLVERLLEEVERALETLEREI

SEQ ID NO: 25674 - protein, 59 aa, Artificial Sequence
  Synthetic
SRLVKKLDEIVKEVAKKLEDVVRRNEELWRKLVELNKESVRRLREIVERVARDLEETAR

SEQ ID NO: 25675 - protein, 59 aa, Artificial Sequence
  Synthetic
RRTEEVIKKIAKLIDELIETLKKIVEDSAKLIKELIDLLEEIIKRSADLIRELEKVSKR

SEQ ID NO: 25676 - protein, 56 aa, Artificial Sequence
  Synthetic
ERRIAERIRELLRESKKLVRDVVEEAKRLLKENRDSTRKIIEDIRRLLRKIEDSTR

SEQ ID NO: 25677 - protein, 59 aa, Artificial Sequence
  Synthetic
DKEDIIRRLARVLERHDEANREVVKEHDEVLEEHLDVHRRVVRSNIEVLRTLLELVEKL

SEQ ID NO: 25678 - protein, 56 aa, Artificial Sequence
  Synthetic
EKDIRKVIEDIERLHRESMEEVRKLVEEIKRLNKEVLKRSEELVEEAKRLLKEVAD

SEQ ID NO: 25679 - protein, 59 aa, Artificial Sequence
  Synthetic
DTKEVIEKLIRVLERAVKLLRELVDRDNRSLKKAVDLHREVVRKIIEVLEEAVRLLATV

SEQ ID NO: 25680 - protein, 60 aa, Artificial Sequence
  Synthetic
EEKLLREVERLVRELAKRLRESLKTVEDLVRELADTNRRSVKTVEDIVRDLERKAREVTR

SEQ ID NO: 25681 - protein, 60 aa, Artificial Sequence
  Synthetic
SKRELLERVIREAERVLKEWEDLLRELTETSDRVIRDVERLLRELLRKAEEVIKDILRKS

SEQ ID NO: 25682 - protein, 59 aa, Artificial Sequence
  Synthetic
EDLKRVLERLTRVAEEILELLEEVLKKSNRSLEKAVEANAEALDRLIEVLRELLDDLRK

SEQ ID NO: 25683 - protein, 60 aa, Artificial Sequence
  Synthetic
SKEELLKKVEDEARKVLEEWKEEVKRLIEESKRVLDDWRRLVDEVSKDIKRVIDEARKDS

SEQ ID NO: 25684 - protein, 59 aa, Artificial Sequence
  Synthetic
EDLKRVLEKLIKVIEKIVRLNEEALRKSNESLERIVKLNEEALRELIRVIERLVELVRK

SEQ ID NO: 25685 - protein, 55 aa, Artificial Sequence
  Synthetic
KEREEIDELVKELEKELRRLVRENEKLVEDNERTLKRLLEENKRLVEELVKRLRD

SEQ ID NO: 25686 - protein, 57 aa, Artificial Sequence
  Synthetic
KDEVVEIVIRVLEEILRLSEEALRIHIRVTREVLRLSKELIDEIRKVLREIADRIRK

SEQ ID NO: 25687 - protein, 59 aa, Artificial Sequence
  Synthetic
SKEELLKELLDRVRRVLTEIKKLLERLLRRSKEVIDDSERLVREVLKRVEDLAREIKAE

SEQ ID NO: 25688 - protein, 59 aa, Artificial Sequence
  Synthetic
KDALDKLRRLIDELARLLREVHERDKELIRDHLREVEEIAKEIARLIKRLAEEIREITT

SEQ ID NO: 25689 - protein, 60 aa, Artificial Sequence
  Synthetic
SERELAKRALERAKEAAEESKRLAKELLDRSRELAKRSKELADEVLKRAKKAAEEIKKKR

SEQ ID NO: 25690 - protein, 59 aa, Artificial Sequence
  Synthetic
KDAAREARKLLKDLLELAERAHKKDRDAIEEHLRLAEEASKRDKELLKELLDLIREIAR

SEQ ID NO: 25691 - protein, 56 aa, Artificial Sequence
  Synthetic
SKEEEVEKVLRKWEEILRRLIEENKRANDKIRREYEELVKEIRRVLEEIKEVAERL

SEQ ID NO: 25692 - protein, 56 aa, Artificial Sequence
  Synthetic
KDVVRKLIEVIERLLRVAEEVIRRILKVNTELMRVDERSIRESLKAIREVLKVLDT

SEQ ID NO: 25693 - protein, 60 aa, Artificial Sequence
  Synthetic
SKEELVDTVKKKLEEVLKKIDKLSRDVKEKLRRVIEELRKLSREVHETNREVARRLREEA

SEQ ID NO: 25694 - protein, 60 aa, Artificial Sequence
  Synthetic
EETVLRTLEKIIRDHNKAHKRVTDAVAKILEELIKLHDEVSRRLKDILRRLLELLDEVTR

SEQ ID NO: 25695 - protein, 60 aa, Artificial Sequence
  Synthetic
RKEELVDTVKKDLERVIETVRKLSEDVKEKIRRVLEDIDRLSKEVHETNKRVVEELEDKK

SEQ ID NO: 25696 - protein, 60 aa, Artificial Sequence
  Synthetic
EETVLRELVKLIRDHNRMHEEVVRRLKKIIEEALKLHDEVSRRVAELLREVIELLDRVAK

SEQ ID NO: 25697 - protein, 60 aa, Artificial Sequence
  Synthetic
DKEREVDEILRRVTKLLKELEKRSKEILDRVRELVREYKRKVEEILKRVEDLIRRLIKDK

SEQ ID NO: 25698 - protein, 55 aa, Artificial Sequence
  Synthetic
DELRKILKELEELLRTLNKELKEVVKELRELLKELHDRLREILEELKRLLEEIAR

SEQ ID NO: 25699 - protein, 60 aa, Artificial Sequence
  Synthetic
DEDELIRKLLEDLKDIVRKILELIERDLRDIERVVRRIVKVIRDDLKKIKEVVDDIRRRV

SEQ ID NO: 25700 - protein, 59 aa, Artificial Sequence
  Synthetic
SELADRIRKLIEDLERHTKKVLEDVKRAITELRKNSKDILEEVRKLIDELRKRIKEVED

SEQ ID NO: 25701 - protein, 56 aa, Artificial Sequence
  Synthetic
KAEEIAKIAVDAVRKIAELLRRASKINLDAIRKAAKLSKEASKINLDAIRKIAEEV

SEQ ID NO: 25702 - protein, 56 aa, Artificial Sequence
  Synthetic
RKALEKARKLAEDALRANKRANDEAKKLADEALKENRKALEDAKRLARKAAEDAKR

SEQ ID NO: 25703 - protein, 59 aa, Artificial Sequence
  Synthetic
SEEELLRRIRELLKKALEDNKDVLREIEELLRKVTEDNDRVLEEIRKLLEEVDEVVKRA

SEQ ID NO: 25704 - protein, 59 aa, Artificial Sequence
  Synthetic
DELRRVVEKIEKVLRDVVRALRELVRINARVLEEILRLIEELVRRNAEVLKRILELVAT

SEQ ID NO: 25705 - protein, 61 aa, Artificial Sequence
  Synthetic
SKEDELRKAEEDARRVVEEILDLNRESVEKSRRVAERVLRLNEDSVRKSRDVVRRIKEEVN

SEQ ID NO: 25706 - protein, 54 aa, Artificial Sequence
  Synthetic
VVRKLIEANEDHLRVNKEIVDRLIKANEEHLEVNRRAVEKLIEVLKRLLDVARK

SEQ ID NO: 25707 - protein, 60 aa, Artificial Sequence
  Synthetic
SEKEDLVRTIEEVVKTIEELVERHERKIDEIVKRSRELVRTHVEKIEEIVRRVEELVRRG

SEQ ID NO: 25708 - protein, 57 aa, Artificial Sequence
  Synthetic
LDTLAEEVKRVLKEHVDLVRKAARLDSETLKKHVDLVRTAAERVSEVMKELVELVRR

SEQ ID NO: 25709 - protein, 60 aa, Artificial Sequence
  Synthetic
SEIEELVKDIERIVREIKKLIDDHVRKLEKIIEDIERDMRRHEETVREVVRKIEDEVRRG

SEQ ID NO: 25710 - protein, 57 aa, Artificial Sequence
  Synthetic
LDSLAKKVSDVARKHLDLARRVIKLISEALKKHIRLVEKAMEDISRILEDLVRLVRK

SEQ ID NO: 25711 - protein, 60 aa, Artificial Sequence
  Synthetic
SKLEDAVRRIEEILRHIVRSLEEVVKDIEKILRDHVRMLREVVKRIEDVLRRVVELLRRA

SEQ ID NO: 25712 - protein, 56 aa, Artificial Sequence
  Synthetic
KDVLREVAERIRKVIERLKELLDRSRERAEDVIKKLRDLLKENERLIEEVRRRLEK

SEQ ID NO: 25713 - protein, 57 aa, Artificial Sequence
  Synthetic
SREEAVADVIRRLEEILEKNLRLLEEIIRRLLRILEHNLRLNEKAVEIIEDLIRKLL

SEQ ID NO: 25714 - protein, 56 aa, Artificial Sequence
  Synthetic
SRLADDLRRVVKKIVEDLEENLERIKDIIRRLVEELERSLEEIRRLIDRLVKEIRR

SEQ ID NO: 25715 - protein, 58 aa, Artificial Sequence
  Synthetic
SEEEAAREAERLLEEAARVAERIVRDSERLLDEAAEVARKAVEDSKKLLEDALRAARE

SEQ ID NO: 25716 - protein, 56 aa, Artificial Sequence
  Synthetic
REAAERVARRAERANEEALKEAEEVIKRAKEANKRALEEAKRVIDRADKALKEARK

SEQ ID NO: 25717 - protein, 59 aa, Artificial Sequence
  Synthetic
RDRDVLRKVKREIEELVRRIEKVSRDALKEVKRLLDENRKIAEDVLRLIERLLRKIRDT

SEQ ID NO: 25718 - protein, 59 aa, Artificial Sequence
  Synthetic
EEVVEELLRMLKRVAEEMKRVHDDLSRAVEKVVRDVVRVDKELLDELRRILRRLEEVIT

SEQ ID NO: 25719 - protein, 56 aa, Artificial Sequence
  Synthetic
SKDEELMRLLEELVERWRKIVEDLERDHRRLVKEIRELVERIRKKLEELVDRIRKN

SEQ ID NO: 25720 - protein, 58 aa, Artificial Sequence
  Synthetic
EEIRRILEELKRIVDDVLRIIARILKLLRDLTRRLAEVAKKVHKLLEELLRKLKEDTR

SEQ ID NO: 25721 - protein, 56 aa, Artificial Sequence
  Synthetic
KDAETLEKVLRDVLERADEIIKRLEDIYREIKKRLEAIIKEAEDINRKILEEIRRL

SEQ ID NO: 25722 - protein, 56 aa, Artificial Sequence
  Synthetic
VKRALEELKDLIDRNLKVLKDLLDATRKLIEENIRVLREILKRIKDIARELLEATK

SEQ ID NO: 25723 - protein, 61 aa, Artificial Sequence
  Synthetic
SSKEEVLELIKELVRSSKEVLERVVRLNEKSLRISVEVLDRIVELIEEIVRIVVRELEKKV

SEQ ID NO: 25724 - protein, 55 aa, Artificial Sequence
  Synthetic
RELLKEIKRIIEEIDRLVKESLKRHKDINDEIRELAKRTLDEIKEVIDRIRERLR

SEQ ID NO: 25725 - protein, 60 aa, Artificial Sequence
  Synthetic
SEEEDVIRDVKRRLEEILKTNADVIRDIEEILKEVKERNKRVVEELKDILRKVLEELRKK

SEQ ID NO: 25726 - protein, 55 aa, Artificial Sequence
  Synthetic
KEVVDLIREIVERLARAVEESLKLLKEIIDLLTESSKELVKLLEEILRTLKEAAR

SEQ ID NO: 25727 - protein, 56 aa, Artificial Sequence
  Synthetic
SDEERLEKVVKDVIEKVRRILEKWKKDIDKVVKELRRILEEWEKIIREVLDKVRRL

SEQ ID NO: 25728 - protein, 56 aa, Artificial Sequence
  Synthetic
ERLLKRVVDILKRLLELNATTIERLLRILEELLKLNKELAERVIRVLEKLLEEIKR

SEQ ID NO: 25729 - protein, 60 aa, Artificial Sequence
  Synthetic
KDMERVLTEHKKAVKELIELLERLLEEHERASRELIKLLRELLERHKRATDELIKLLREN

SEQ ID NO: 25730 - protein, 56 aa, Artificial Sequence
  Synthetic
VEEVVKRLEDVNRTLEEIIRKVEEEAKRVNEDLRKRIEDVVRTLEEVNKRLKEITK

SEQ ID NO: 25731 - protein, 56 aa, Artificial Sequence
  Synthetic
SELEEVAELLKRSKELIDEVEERIRRLATESLRFLDEVVRRIRELLTRLLKEVRDS

SEQ ID NO: 25732 - protein, 55 aa, Artificial Sequence
  Synthetic
ERLLKKTEDVVREILRLIEEVLRTHAEIIREILELIERLLELHKTLVDRLLERIE

SEQ ID NO: 25733 - protein, 56 aa, Artificial Sequence
  Synthetic
SVLETVKRLAEESSERIRKIVEDDKRVADDSSRKIKELIEEIKRRVKELLDRIKDL

SEQ ID NO: 25734 - protein, 56 aa, Artificial Sequence
  Synthetic
KEVVIRLIEELVKLLEDVLRRLLEVNETLVELNKRVWDRLVRINEELAEVALRVAT

SEQ ID NO: 25735 - protein, 56 aa, Artificial Sequence
  Synthetic
SVLETVKKLLEDSSEKIERIVEEDERVAKESSDRIRRLVEEDKRVADEILDLIEKI

SEQ ID NO: 25736 - protein, 56 aa, Artificial Sequence
  Synthetic
KDAVIKVIEKLIRANKRVWDALLKINEDLVRVNKTVWKELLRVNEKLARDLERVVK

SEQ ID NO: 25737 - protein, 59 aa, Artificial Sequence
  Synthetic
SIRELLKELEDVVREIIRDIRRLLEESRRVVERIERETKRLLDEIRDVARRIEETIRRL

SEQ ID NO: 25738 - protein, 59 aa, Artificial Sequence
  Synthetic
KEAVDELRRLLEELKKIVEDILRTLEKLNRELLEIDKRVADRLRELLRTLKKLIEEAAT

SEQ ID NO: 25739 - protein, 57 aa, Artificial Sequence
  Synthetic
SKEEAIKELLKKHKRITEDIIRMARELDREHEEITREIAERLRRLLKKLLDDVRREV

SEQ ID NO: 25740 - protein, 55 aa, Artificial Sequence
  Synthetic
ERAKRVLDKILDDVRRLVEEAAKLLDESVKKSTDIVRRVRKLLDDSLKEVAELAK

SEQ ID NO: 25741 - protein, 57 aa, Artificial Sequence
  Synthetic
KKEDDVRRLLKEHEDITREIIKLIRDLARKHLELNKRVIRALEKVLKDLEDEVRKDV

SEQ ID NO: 25742 - protein, 55 aa, Artificial Sequence
  Synthetic
ERVRRVLDRVVERVAELVREWKELLKRSLDEVREVVKRARDMLRRSVKTVKELVD

SEQ ID NO: 25743 - protein, 58 aa, Artificial Sequence
  Synthetic
DEVEDARKKLEDLERENRKVIKEIEDALRELVKDHDRVVEELRRRLRRLLEELKKLVD

SEQ ID NO: 25744 - protein, 60 aa, Artificial Sequence
  Synthetic
DEEMLKRVVDVLEDLVRTIEKVLRELSETLRELVRRLLELLRENNESVRRLIRILEEALR

SEQ ID NO: 25745 - protein, 60 aa, Artificial Sequence
  Synthetic
SEDEAAERLLREAKKILKRLEDAARESLKSAERILEELEKAARDSLRKAEKIIRDAKRKG

SEQ ID NO: 25746 - protein, 55 aa, Artificial Sequence
  Synthetic
KEAEKLATKLVEDSERAAREAKKLADENVKRSKEAAEEAKRLADRLVKEAEDDAR

SEQ ID NO: 25747 - protein, 59 aa, Artificial Sequence
  Synthetic
SEDEELLKRLDELLKEILKVIEELIRRLEKAHKENMDKIRDSARRLRELLRKLAEDERE

SEQ ID NO: 25748 - protein, 56 aa, Artificial Sequence
  Synthetic
EELVKEILERVDRLLRKSLERLREVLEESRRRLEEVLRALEEVIKRVRDLLRKLRE

SEQ ID NO: 25749 - protein, 57 aa, Artificial Sequence
  Synthetic
RKKEELARVLEESLEVNRKLVRDLAEVLRKDLEIIRELVKRLVEILKKILKVLADVI

SEQ ID NO: 25750 - protein, 59 aa, Artificial Sequence
  Synthetic
EETLRKVVEDLERLLREARRVVKEAVEKSRRSLEDLRRIIEEAIRRNEKILRKLKEIVK

SEQ ID NO: 25751 - protein, 59 aa, Artificial Sequence
  Synthetic
KEDELLRRIKEVIDKTLEDMKRLLKKHKELLDEILRLLAELVEENKKLIDEILKLVEDS

SEQ ID NO: 25752 - protein, 59 aa, Artificial Sequence
  Synthetic
EEAKELVRRLKRAVEESKKKLDELVKDVKRLADDSARDLRELVKRIAELVKKIRDELRD

SEQ ID NO: 25753 - protein, 63 aa, Artificial Sequence
  Synthetic
DAEEALKRAREVLKEAADLNRKAVEDARKILKDAADDNKRALEEAERVLRKALEDAKDARARN

SEQ ID NO: 25754 - protein, 56 aa, Artificial Sequence
  Synthetic
AEKAAEDAKRLLEEAEEASKKLIKAAEELLRELAKASKRALDEARKLIEEAEKAAR

SEQ ID NO: 25755 - protein, 61 aa, Artificial Sequence
  Synthetic
SEREDLLRLIEEVIRELIKLLETNLRLNEETIRTLIRLIKKDLDLNRRSVEELVKLLKERV

SEQ ID NO: 25756 - protein, 59 aa, Artificial Sequence
  Synthetic
SEAADEVRKKLAEDERLNDKSLEELKRILDKDREINRRVAEKLTRILETLRKIIEDVAR

SEQ ID NO: 25757 - protein, 58 aa, Artificial Sequence
  Synthetic
DDLERVLDELRRIIEEIKRRIDKILEDYERVLRDAKRLIDDVLREYRRIIEELKDLLD

SEQ ID NO: 25758 - protein, 59 aa, Artificial Sequence
  Synthetic
KDVLERIKRLLDELRRANEEVVRRVKKILDESLKENRDVVRELKKILDELLEIVAEAAR

SEQ ID NO: 25759 - protein, 57 aa, Artificial Sequence
  Synthetic
SKKERLKKLIKEHLDLLRRLLKELEDLIRKHLELLRRLLRRLKELLRELLKLIEELV

SEQ ID NO: 25760 - protein, 54 aa, Artificial Sequence
  Synthetic
RVEKEVRRALEKVERLIREIKRLVERSLEEVEKLIREIKKRVRDSLRKVKKESE

SEQ ID NO: 25761 - protein, 60 aa, Artificial Sequence
  Synthetic
DEIETVLKRLAELIKESLDLLRETLDELRKIIEESKKSLEDVLRRLKELIDRLRRLAEEK

SEQ ID NO: 25762 - protein, 60 aa, Artificial Sequence
  Synthetic
KDELLRRVEEILKRLLELIRRIIEEHRKILERLLETHEDLIRKHEEILRRLLKAADEERQ

SEQ ID NO: 25763 - protein, 60 aa, Artificial Sequence
  Synthetic
SEKEDVLRRVEEIARRVRDILRRNLEKVERIAEELKKINDDLLKEIERIIKELKEVLRDV

SEQ ID NO: 25764 - protein, 56 aa, Artificial Sequence
  Synthetic
IEEVLEILDRILKTARDVSKENLESLKRALELDRRTNERLEDLLREILELLRKDIQ

SEQ ID NO: 25765 - protein, 60 aa, Artificial Sequence
  Synthetic
SELEELRKLAEEAIEAAKRALDRLHKLSRELIEAAKEILKRLKKLSEDLIRAAEEAARRS

SEQ ID NO: 25766 - protein, 58 aa, Artificial Sequence
  Synthetic
EDAKRAKEIAKEAIERSKKIADEAREIAKRAIDKSKKIAEEAKKIADEVLKRAEDIAR

SEQ ID NO: 25767 - protein, 61 aa, Artificial Sequence
  Synthetic
RESEELIRLLRKIIELLEELVERIRDLLRKHLKLLEEVVELLKRNLDEILRLLEEVLREAN

SEQ ID NO: 25768 - protein, 58 aa, Artificial Sequence
  Synthetic
EKAKKLEELLRDLLRTVREIVKEVRELLEESLRTAEKLVEDIKRELDELRKRLKELVD

SEQ ID NO: 25769 - protein, 58 aa, Artificial Sequence
  Synthetic
DEERLVEEIIRTIKRVIELNEESLREIERVLEEVIKMDKRSLEEIKRVLDEILKLARD

SEQ ID NO: 25770 - protein, 60 aa, Artificial Sequence
  Synthetic
GEELERVLRELKKVLEELIKDNERVNDELRRVLEKLKERNRKVLEDIKRVLEELRDEVER

SEQ ID NO: 25771 - protein, 58 aa, Artificial Sequence
  Synthetic
SSEEIIRTLEKAIRESEEKLERLVRRDEEVVKDLRTKLRENLDRVRRMVEELVRMLES

SEQ ID NO: 25772 - protein, 60 aa, Artificial Sequence
  Synthetic
KDTLVKVLKEVLERHVEADEKAVRELAKVLEENVRLLEELVRVNKEVLRRILELVKELAK

SEQ ID NO: 25773 - protein, 57 aa, Artificial Sequence
  Synthetic
SKEEKLKDDVRRVLEDLDRVLKELEKLSEDNLRELKRVLDRITDLHRRILDELRKKI

SEQ ID NO: 25774 - protein, 59 aa, Artificial Sequence
  Synthetic
SKVAEDILRVLEKLVKVSREAIKLILELSEHHVRVSTRIARLLLDVARKLFEVIKEAER

SEQ ID NO: 25775 - protein, 57 aa, Artificial Sequence
  Synthetic
KKEDELEKMVRDVLEDLDRILREAEELSRKNNDDLRRVLDRLRRLAEEVIKRLEEKV

SEQ ID NO: 25776 - protein, 59 aa, Artificial Sequence
  Synthetic
SEVARVILEILKRLLKALKEAAEELKKISEHHLRVSEKVVRDLDRVVKKIVDVARRVAT

SEQ ID NO: 25777 - protein, 57 aa, Artificial Sequence
  Synthetic
SEKEKLLRDLEEVVRDVIRLSKESVDKLKETVDRLVEESRRTVEELRRIVDRVAKEV

SEQ ID NO: 25778 - protein, 58 aa, Artificial Sequence
  Synthetic
EIVKLLEDVVRELVEVLRKSTEVIERAVKKLVDILRESLKLIEDVVRRLVEIMEEIVR

SEQ ID NO: 25779 - protein, 61 aa, Artificial Sequence
  Synthetic
SEIEDVIRRLRKILEDLERVSEKLLREIKKILDEARRLNEEVIKEIKRVLEDAVRVFRDIR

SEQ ID NO: 25780 - protein, 56 aa, Artificial Sequence
  Synthetic
IEDLVREVERLIKRIEDSLRELEKTVRELLKRIKEASDKVREDVDRLIKELKEAAD

SEQ ID NO: 25781 - protein, 60 aa, Artificial Sequence
  Synthetic
SREEIVATLEDLARKILEVVKKLAKEIEDAWREIERKVREILKRLEELWREIEDVVRKKV

SEQ ID NO: 25782 - protein, 59 aa, Artificial Sequence
  Synthetic
RELVKELVELLEEILERNTRVIKEIIDLLRTVIRIHEKIVEDLIKLLEELLRRLEEATR

SEQ ID NO: 25783 - protein, 58 aa, Artificial Sequence
  Synthetic
KEKEDALKKLEDLARKSREDLERVLRKHKKILDKIEELLKRVLDEHKKIVDDILRKTG

SEQ ID NO: 25784 - protein, 59 aa, Artificial Sequence
  Synthetic
EELAREVERVIKELLDKSKEILERIERAIDELLKVSEEILKLSEDASEELLKILREFAK

SEQ ID NO: 25785 - protein, 58 aa, Artificial Sequence
  Synthetic
DEKEEALKTVERIIRDIVRRLRELLKEHEDIVREIERELKEVHEKHKRLVEKALEELG

SEQ ID NO: 25786 - protein, 59 aa, Artificial Sequence
  Synthetic
DRLADLIRRAVDRLRDISREILKRLVEVIERLLEVSEKILKLVEEVIRELLRVVEEAAK

SEQ ID NO: 25787 - protein, 59 aa, Artificial Sequence
  Synthetic
SVVEILAEVLKRLLDILRKLVDAIRDVVKKHVEVVEKLVRLHEEVLRRLVDILRKIAEV

SEQ ID NO: 25788 - protein, 60 aa, Artificial Sequence
  Synthetic
EEILRRLVEEAKRLVAESIKKLRDLVRKIREAHKEAIKRLEEIVRKVEEIVRKVIDELRK

SEQ ID NO: 25789 - protein, 62 aa, Artificial Sequence
  Synthetic
SDEEKLRRLLEEVRRLAKRVIDELERVLRESKRLAEENIEELDKALEEVKRLIDDVIKKLRD

SEQ ID NO: 25790 - protein, 60 aa, Artificial Sequence
  Synthetic
SETIERLLRELLKVLKEIVDRHRRIIERLLKASEDAVRELKKLIEETLRVLTDVVRRTET

SEQ ID NO: 25791 - protein, 56 aa, Artificial Sequence
  Synthetic
SLVDELRKSLERNVRVSEEVARRLKEALKRWVDVVRKVVEDLIRLNEDVVRVVEKV

SEQ ID NO: 25792 - protein, 56 aa, Artificial Sequence
  Synthetic
DEELKRVLEKAADLHRRLKDRHRKLLEDLERIIRELKKKLDEVVEENKRSVDELKR

SEQ ID NO: 25793 - protein, 55 aa, Artificial Sequence
  Synthetic
SKEERLREVAEKHKKDLEDIVKRVDEAAKETKRRLEEILKRLEEVLKKILDDLEK

SEQ ID NO: 25794 - protein, 55 aa, Artificial Sequence
  Synthetic
KEVLDILERAVEVVRRVIKALKEVLERHVDATREVIERVKRVNKRLLEAVREVVT

SEQ ID NO: 25795 - protein, 56 aa, Artificial Sequence
  Synthetic
SREEKLEELIKELERRLKDVLDRSRELNREIRKTTEEVIREVDRLLREIEKIVRDV

SEQ ID NO: 25796 - protein, 59 aa, Artificial Sequence
  Synthetic
EDTARLVREVAELIEKVVREIVKLIDEDLKKLERVVRENARLLREVVELLLKVVRDVAK

SEQ ID NO: 25797 - protein, 62 aa, Artificial Sequence
  Synthetic
DEKELLEEIIKKVEDLLRESRELWERLIKRVKELLKRSKETVDEILKRIKELLDELRKVAAE

SEQ ID NO: 25798 - protein, 60 aa, Artificial Sequence
  Synthetic
DKRLLDVIKEIVEKLIEVVRKLLEADKRIIEELIRVLEKIAEVDETIVKRLIEVLKKIAD

SEQ ID NO: 25799 - protein, 61 aa, Artificial Sequence
  Synthetic
SEEEDIERVLRELKKLHKDHLDLLREVVKRAEELLRRHLEILREVLKREKKLLKDVLRDAR

SEQ ID NO: 25800 - protein, 55 aa, Artificial Sequence
  Synthetic
DELLEEAKKLVKEVRELAEETLRRLARLVEDVKRLNDEAVKRLRELVRRIKEEVR

SEQ ID NO: 25801 - protein, 59 aa, Artificial Sequence
  Synthetic
RTEEILREIVDLLRRVAEENLRTLEELVELLDRVARRNLESLRELVRILEEVLKKLLKK

SEQ ID NO: 25802 - protein, 56 aa, Artificial Sequence
  Synthetic
EDVLRELDEVVRRVIERDREILRELKRLVEEVIRKNEDIVRKLEEAVERVLRKLKD

SEQ ID NO: 25803 - protein, 59 aa, Artificial Sequence
  Synthetic
SEKEEVIKDLRKVLEEVLRRHEELVERLKEVLRKVLEDHKKLVEDLKRVLDEVRRKLEN

SEQ ID NO: 25804 - protein, 57 aa, Artificial Sequence
  Synthetic
REELLRRLERIVEDIIRLLEESLKLAAEVIKTIIRLLEESLERLKRLVDDIVEKLRK

SEQ ID NO: 25805 - protein, 60 aa, Artificial Sequence
  Synthetic
SEKELLERLEEVERRLLEIVRRLLKRNRDVHEELLRIVEANLRRNKKVHEDLLEKVRKSV

SEQ ID NO: 25806 - protein, 59 aa, Artificial Sequence
  Synthetic
DKVVKELEDIVEELMEENKDSLRRLKEIVEELLEENRRVLEKLRKIVEDVARELEETAT

SEQ ID NO: 25807 - protein, 58 aa, Artificial Sequence
  Synthetic
SIEEVLREIVKLLREVLERLIRVDERLVEALKRVAEKNIEVLRRAVDALRKVLELLRR

SEQ ID NO: 25808 - protein, 57 aa, Artificial Sequence
  Synthetic
EETVIRRVEDVLRDLLRRLEEVVRRSTEEAKRLLKESRDVVRDVEKTLRELLEELRR

SEQ ID NO: 25809 - protein, 58 aa, Artificial Sequence
  Synthetic
SVEEVIRKAVTDLDRVLKTNIRVDERLIEMLKRVADENREVLEKIVRLLKEVLDLLRN

SEQ ID NO: 25810 - protein, 57 aa, Artificial Sequence
  Synthetic
EKEVVDKVKRVLDELRRDLERVVEESEKLARDLLRKSRDVVRRTRELLKKLLEEVET

SEQ ID NO: 25811 - protein, 64 aa, Artificial Sequence
  Synthetic
SRRETLEKLLKEIEDLIRESLERLEKLLEENRTLIDDDERRVRELARDIKELIKEIEERLRREN

SEQ ID NO: 25812 - protein, 55 aa, Artificial Sequence
  Synthetic
EEILKIIEELIKRLEKLNEDSNELMKELVKRNERLARENLKLVEELLRRIEETTR

SEQ ID NO: 25813 - protein, 56 aa, Artificial Sequence
  Synthetic
SEVERLRELVERWREELKKLLDELRKVVEEIARELKKINDELRKLVEDIAREARRE

SEQ ID NO: 25814 - protein, 56 aa, Artificial Sequence
  Synthetic
ERVIEELIRVLRKVVEDHADVTRRLVEVLRKVVKLIEEVLKKDEKVLRDIVDRLKT

SEQ ID NO: 25815 - protein, 57 aa, Artificial Sequence
  Synthetic
SEVEEVVRVLEKVLRLLRRLVEELHRLSERVLELITRLLKELKDLSREVIKRLEDAN

SEQ ID NO: 25816 - protein, 59 aa, Artificial Sequence
  Synthetic
KEKIDELRRVLERVEREHRRVIKKIRDVVEKVKRDHERVLREVEKVVREVRTELEKLRE

SEQ ID NO: 25817 - protein, 61 aa, Artificial Sequence
  Synthetic
SVEEELRELVKRVEKLVERLRRIVKEIIERSRDLVRKSREVVDRLKKELDELVKEVVREEG

SEQ ID NO: 25818 - protein, 59 aa, Artificial Sequence
  Synthetic
DEVIRRIAEVVKRLIDKLKELSDDNRKAVEDHERLVRKAIEELVREVEDILRRIDETAR

SEQ ID NO: 25819 - protein, 56 aa, Artificial Sequence
  Synthetic
SEKELLKEILDRIRELLEDDNRLLKRIVDEIRKLLEEWLRVHKEILERIKELLDRI

SEQ ID NO: 25820 - protein, 62 aa, Artificial Sequence
  Synthetic
EDMVRKIRKIIEELKRLLEDLRRDTRRVIEEAKRLLKEWRDRNKEVADTLKKLLEDLIRKIR

SEQ ID NO: 25821 - protein, 56 aa, Artificial Sequence
  Synthetic
REDEIVEDWRRLLEEAKRRSEEVAKEIRDRAREVTKESKRVADEWRRLLEEVKKRA

SEQ ID NO: 25822 - protein, 59 aa, Artificial Sequence
  Synthetic
EELVRVARDLVRLNEEVLRKSNRSVEELLKALARVLDRSNKSLEDLVELNKRVLDKLRT

SEQ ID NO: 25823 - protein, 59 aa, Artificial Sequence
  Synthetic
RKEDLVREWRELLRKILEDLEDLVRKWRKLLKKILDDLRELVRRVREELDKALRTVEKG

SEQ ID NO: 25824 - protein, 57 aa, Artificial Sequence
  Synthetic
LRDLVRKIIEIIEDILRLLEEVLRKNVKAVEEVLRLAIRVLEENIEAVEKVLEDVRR

SEQ ID NO: 25825 - protein, 58 aa, Artificial Sequence
  Synthetic
SEEELLREIEKILDEVRKLVEKLLEDNRRLADELIKLIKELLDRNLRLIERLLELLER

SEQ ID NO: 25826 - protein, 59 aa, Artificial Sequence
  Synthetic
EELREVLERALRKAKKIHEDLKRIVEDVRRRNDEILKDLERVLKEVEDKIRKILDELRK

SEQ ID NO: 25827 - protein, 59 aa, Artificial Sequence
  Synthetic
RDEDIKRELVRLVEEILRTSARLLDESIKSNKKTLDDIERVAREIVREIEELLKRIADG

SEQ ID NO: 25828 - protein, 55 aa, Artificial Sequence
  Synthetic
DELKKDIRDVLERVKRIAEELRELVERDIREDKRLLDELAKLWRDLLKMIEDLRR

SEQ ID NO: 25829 - protein, 61 aa, Artificial Sequence
  Synthetic
SEDELLEKIVRKLREAVKRIEEELRKSKREIERLVKEIKEKLEDSLRRVKETLDRIRETRK

SEQ ID NO: 25830 - protein, 56 aa, Artificial Sequence
  Synthetic
LEELLRLLKEVIERSIESLERLLELILRVLEYSVRSLEELLRRLLEVIKRIVDTTK

SEQ ID NO: 25831 - protein, 59 aa, Artificial Sequence
  Synthetic
DEDEIAEELKRLLREVEEKSKEIVRRMRELAREANKKSEDILRTLEKLLEELRRRVEEN

SEQ ID NO: 25832 - protein, 56 aa, Artificial Sequence
  Synthetic
IDEVVRRIERVIREVIKILARANKRLHDVVEEIIRLLEEVTDELRRVVEEVIRRTK

SEQ ID NO: 25833 - protein, 56 aa, Artificial Sequence
  Synthetic
DKEEEVRRLIEENLKKIEEVIRELEKIIRDNLRKLEEVVREIEEELETTLRLIETD

SEQ ID NO: 25834 - protein, 59 aa, Artificial Sequence
  Synthetic
EDLLRKLKELLETLKRRIDEIEKKLEEILKETKDLIRRLLEKLKRIDEELRKTLEDLRR

SEQ ID NO: 25835 - protein, 61 aa, Artificial Sequence
  Synthetic
DDIDEILRRLREEIEDARRKLEKILRELRERIKDYKRKTDELLKESRKRIREAEDRVRRDG

SEQ ID NO: 25836 - protein, 59 aa, Artificial Sequence
  Synthetic
DKVLEALLEKLLRSNEELVKIDRDLLRDLLRVLEELIKTVRDLLRELLRVLEEVAREIK

SEQ ID NO: 25837 - protein, 60 aa, Artificial Sequence
  Synthetic
REEETLRDIERLLRKLLEELKRTADELIDSHRKLIKKLKEILDRLRRSHEKLIETLRRRL

SEQ ID NO: 25838 - protein, 59 aa, Artificial Sequence
  Synthetic
EDVKRELREVVKEHKEDLDRIKKELKELLDRHTETLKRIVKKLRDLLEEIRKALEDLKK

SEQ ID NO: 25839 - protein, 59 aa, Artificial Sequence
  Synthetic
DEERVVEEAIRVLKEVLDLHRELIKRSIDVLKESLKVHERAVESLERVLKEILDLVRRG

SEQ ID NO: 25840 - protein, 56 aa, Artificial Sequence
  Synthetic
EEEVAERVKRIIEEVRKLAEDSRRKTEELIRRVKELAERTDETVRRVIEELRRRTK

SEQ ID NO: 25841 - protein, 59 aa, Artificial Sequence
  Synthetic
DEEDVARKLIEVLKELLKLVEDLIRTNIRVLEESLELHRRLIEEIEKVLKRILELLEEG

SEQ ID NO: 25842 - protein, 56 aa, Artificial Sequence
  Synthetic
REELAKEVKRVIEELKKLARESAEESKRIIRTIEELLREARKRAREVIEELKERTR

SEQ ID NO: 25843 - protein, 60 aa, Artificial Sequence
  Synthetic
DAEEVLRLLAEVLERIIELIKKVNEILIRVLREVIRLIEEVNELVREVLKRIIELIRRDI

SEQ ID NO: 25844 - protein, 55 aa, Artificial Sequence
  Synthetic
ERILEEIERLVREVEEIHERVLRRLKELLKKVREVHEEVLRRIERLAERVREALK

SEQ ID NO: 25845 - protein, 56 aa, Artificial Sequence
  Synthetic
SVREELEKVIREVIEEVERVLERIRDELRKSLERLKEVIKRIEDVHRDLIRRIREI

SEQ ID NO: 25846 - protein, 56 aa, Artificial Sequence
  Synthetic
IEEVLKTVEDISRRHRELLKRILDTSKRSIEETLKLAREILETLKRLLKELLDAAK

SEQ ID NO: 25847 - protein, 59 aa, Artificial Sequence
  Synthetic
DAEDEARRVIDEAVDRLRKAVEEIAEVARRHLEEVEEVVRKLEEIIRESLERVRRASEA

SEQ ID NO: 25848 - protein, 59 aa, Artificial Sequence
  Synthetic
DKEAEEVVRRVERLHEDVLRRLKEVVKRVKELHEEILDRLREILDRVRELARKVREDLR

SEQ ID NO: 25849 - protein, 56 aa, Artificial Sequence
  Synthetic
SEKERLSKIAEDLIRRLEEELERVERTHERLLRKLEELLKKIEKEYRDAMRKLETL

SEQ ID NO: 25850 - protein, 57 aa, Artificial Sequence
  Synthetic
IKEVLDDLKRVLERDLRAIKKIVKELKRILKENLDVLREIVERIKRVLEKILREVEK

SEQ ID NO: 25851 - protein, 60 aa, Artificial Sequence
  Synthetic
SREERLERVLERVKRAIDRYRDMLRRLLKTVEDLIRKYEEDLKRLLKEAKELIDKVKEEN

SEQ ID NO: 25852 - protein, 59 aa, Artificial Sequence
  Synthetic
EEIKKIIDRLREEIERILDELRRLNEELVETLRRVLETLRELNERLVKLLRDLLREEKK

SEQ ID NO: 25853 - protein, 60 aa, Artificial Sequence
  Synthetic
DEEEKMKKIEDVARRYKEEVKRVLDDLERLLRESEEEVERIVRKLEKLARDLEERVRELT

SEQ ID NO: 25854 - protein, 59 aa, Artificial Sequence
  Synthetic
KEVIDALKELLKVLEDLLREIKEALTRNLEKIDELLKLLHELSRRVIEELRKLLEDLKR

SEQ ID NO: 25855 - protein, 57 aa, Artificial Sequence
  Synthetic
REDEELARKAKEVLKETEDLLRKLEEEVKRVLEEIKRMNREVREKVKEVIKELRKRL

SEQ ID NO: 25856 - protein, 59 aa, Artificial Sequence
  Synthetic
KRLLDLLRDLLRLLKELLETLEKLNERTLKLLRDLLRKLKEALRRNLKLLRELVDEAAT

SEQ ID NO: 25857 - protein, 60 aa, Artificial Sequence
  Synthetic
SKDEIIKRIKDELEKLVRDVERLLRESERRIADLVRRVREILEESKRRVDELVKRVKETG

SEQ ID NO: 25858 - protein, 56 aa, Artificial Sequence
  Synthetic
VETILRVATEVVKESATVLKRILETLEEALKRNVRIIEEMLEILREVIERIARKLK

SEQ ID NO: 25859 - protein, 55 aa, Artificial Sequence
  Synthetic
SEEEILREIKRLLEEHLELNERILREIKKDNKRTLKELRDIVRELKEILERIKRR

SEQ ID NO: 25860 - protein, 55 aa, Artificial Sequence
  Synthetic
EELRKLLEDARRALERILRRLAKIVKEIKEKHEEVLRRLEKSVREIDERLRRARE

SEQ ID NO: 25861 - protein, 57 aa, Artificial Sequence
  Synthetic
SELERLERLLKEIVEVNRKALEDLRRVLEETVRRDREVLDRTRRKLEEIAEEILREL

SEQ ID NO: 25862 - protein, 59 aa, Artificial Sequence
  Synthetic
REDLKRLEDLVKRIEEELRRKLEKYERELRDLKRKLEELLKRYEEKVKELKRKLDEALK

SEQ ID NO: 25863 - protein, 57 aa, Artificial Sequence
  Synthetic
SEEEILRRIAEEIKRLIDEDLRLIEELVRKIKTVAKRDLELIARLVEKIEEVIRRSI

SEQ ID NO: 25864 - protein, 59 aa, Artificial Sequence
  Synthetic
EEELKTAEKIIEDIKKEIDDVHREVRRLLEEIKEDIDRVNEEVKKRLEDIIEKIRRAAK

SEQ ID NO: 25865 - protein, 59 aa, Artificial Sequence
  Synthetic
SIEELAEDIKKILDDALELLERLAKRAKEINDEILDELRKLVEKNKRDLDRALEKLRRE

SEQ ID NO: 25866 - protein, 58 aa, Artificial Sequence
  Synthetic
ERVRKLIRELEEELKDNRRLIEELVRRARKVNKRLRELVEEVIDRLRELLERIEEKIR

SEQ ID NO: 25867 - protein, 56 aa, Artificial Sequence
  Synthetic
SKEETLRKEAEDLLRRLEELTRRLEKKARELLERAKKLSRDLAEELKRLLKELREK

SEQ ID NO: 25868 - protein, 59 aa, Artificial Sequence
  Synthetic
ERLKRLVEELLKAVTDLSRKNKRILEELLKAIETLSDENKKILTEILDALRRLVEKIEK

SEQ ID NO: 25869 - protein, 60 aa, Artificial Sequence
  Synthetic
DEERKIVETLHRTSREVIKTLEKIVRDLKEVLKKNLELTERLIKRVHEVSREILRLTREN

SEQ ID NO: 25870 - protein, 59 aa, Artificial Sequence
  Synthetic
DRVKKELEDANREVNKKLEEVLREIRELHKRVLDRLDEVLRRVEEINKRVNERLDRTAK

SEQ ID NO: 25871 - protein, 57 aa, Artificial Sequence
  Synthetic
SEVEDLKRKLEEDLERHKKDVKRLKDEAERRLEEHKRLVEELERRIKKLLDELKDRN

SEQ ID NO: 25872 - protein, 55 aa, Artificial Sequence
  Synthetic
KDVLRDLERILTELAKALKDLIDNSRRTLEKLLKALRDLIRESKETLEEVLRRTD

SEQ ID NO: 25873 - protein, 56 aa, Artificial Sequence
  Synthetic
KEREEVKEKLDRLLEEVEKTVRELKREHDELLKEVEKLVRDLKKEHDELLKKVKDD

SEQ ID NO: 25874 - protein, 59 aa, Artificial Sequence
  Synthetic
KDRLDKVEELVKKLLEDTKRTVDRVRELVRKILKKSRETLEELERLIEKILRELEKDAR

SEQ ID NO: 25875 - protein, 56 aa, Artificial Sequence
  Synthetic
SERETVKRRLEELLKEVKRTLDKLKEEHDRLLEDVRRVVEELKREHDKLLKEVKDS

SEQ ID NO: 25876 - protein, 59 aa, Artificial Sequence
  Synthetic
DKRLEDISRLVKRLLDESRRVLRELEETIRKRAEESKRVLEEVKRLVEKLIRELRKEAE

SEQ ID NO: 25877 - protein, 59 aa, Artificial Sequence
  Synthetic
SEDEIIKKIIEDLRRVLKEVEEIHKEVEERLDKVLKEAEEMHKEVLKELDRVLDEVKRI

SEQ ID NO: 25878 - protein, 56 aa, Artificial Sequence
  Synthetic
ERLLEELIEELKDLIRRHIELLRRLIERLKELLKKHIEDLRRLLEEIEKLLEEARK

SEQ ID NO: 25879 - protein, 60 aa, Artificial Sequence
  Synthetic
SREDEVRKVVEKVLRDSKRSMKELRDVVTEVLKKSKEVLRELKEAVDRVLKKLKDISRDV

SEQ ID NO: 25880 - protein, 56 aa, Artificial Sequence
  Synthetic
EELVKELLEFLKRVLEKAERLVRKNLEDNKELLERLERLIEENLKLLEDLLRRTEK

SEQ ID NO: 25881 - protein, 59 aa, Artificial Sequence
  Synthetic
SEEEKLRELKEILDRTLKKIEDLIEESKRLNEEHVRLTREILDEIRRLLEELLRKLREA

SEQ ID NO: 25882 - protein, 59 aa, Artificial Sequence
  Synthetic
EEILKRIEDTLKRLKEELKRLVDEVRKHIEELLERSERLIRELRRTLEEILKRLKEKTD

SEQ ID NO: 25883 - protein, 63 aa, Artificial Sequence
  Synthetic
SAAELVLELLARVVKLLEEVLKRLIDLHRDVLKKIKDVLDRDHELHERVLRELVKVLREAERR

SEQ ID NO: 25884 - protein, 56 aa, Artificial Sequence
  Synthetic
REELEKRLRETLDEHRDLLRKLKEFLDRSLEDLERRVDEVRKELERVLEELKRKLK

SEQ ID NO: 25885 - protein, 57 aa, Artificial Sequence
  Synthetic
KEVEDIERVLRKALELSKKVSDDLERVLRELLKLSKEVIEKLVRVLEEILELLKREN

SEQ ID NO: 25886 - protein, 59 aa, Artificial Sequence
  Synthetic
EEDLRRVRELIKKVLKDLERVLKEAEDLHREVLEKLKDVVRRAAEMHEEVIRALKEVSR

SEQ ID NO: 25887 - protein, 59 aa, Artificial Sequence
  Synthetic
DEEELLREIKTILDESLKALEELIRKIMRILDKSLKDLEEIVREIKKTIDELLEKVRRS

SEQ ID NO: 25888 - protein, 55 aa, Artificial Sequence
  Synthetic
EEALDDLRRLVKELKDKLRKLLKDYKDLLKELKDEAKKLLDDYRRLIEELEKKAR

SEQ ID NO: 25889 - protein, 59 aa, Artificial Sequence
  Synthetic
SEKEKLDELRKLIEEIERELDRLLEDNKRAVEKVLRDLDRLLKKSEDDVRRVEEELDKD

SEQ ID NO: 25890 - protein, 59 aa, Artificial Sequence
  Synthetic
KDLAERIRKILDDLLEVHERVARAIEELLRELLEKNEEIVRTIKKLLKRLLDTLRKAAE

SEQ ID NO: 25891 - protein, 58 aa, Artificial Sequence
  Synthetic
SKLETVIRILEELVKVHEELLRIVKKILEELVRVHRRVSEENLRLWKELLDALREDKG

SEQ ID NO: 25892 - protein, 55 aa, Artificial Sequence
  Synthetic
EELLKRVEDVNRESRKVLEESLRRVEEALEKIERALRKSEEDIRRLMEDIKRVLK

SEQ ID NO: 25893 - protein, 60 aa, Artificial Sequence
  Synthetic
SREEKIEKLIRLVEELLERLRELLERNAELIKRLLDRLRELLKELERLNEELLKKLLEKV

SEQ ID NO: 25894 - protein, 55 aa, Artificial Sequence
  Synthetic
RELEELIKKVERDHERVIKEVEKLVKELLDRSEEIHKRAKELIKEVLDRVREAAR

SEQ ID NO: 25895 - protein, 60 aa, Artificial Sequence
  Synthetic
SREELLDRILEAIAKILEDLKRLIDENLRRLEEVVRELERIIDRNLKLIREILDELKKRG

SEQ ID NO: 25896 - protein, 59 aa, Artificial Sequence
  Synthetic
DEIIRKLDELLKEVEKVHKEVKDRIRKLLEDHKRSLDEVKKKLERLLERAKEVVEREKK

SEQ ID NO: 25897 - protein, 61 aa, Artificial Sequence
  Synthetic
SEREELLERIKEILKRVKDKLDEDLKRLKEILEKLKEKADRDLEELRRRIEEVREKLERTG

SEQ ID NO: 25898 - protein, 60 aa, Artificial Sequence
  Synthetic
SETAVRAIIRVLEKHLEAVRRVLEELLKVLAEHLETVRELIERLKRVLEEAIEVVERVAR

SEQ ID NO: 25899 - protein, 60 aa, Artificial Sequence
  Synthetic
DEERKLKELLDRLRENIRALRELIKDNLRLLKTLVDALEELLKDNLRLLRELAEEAARRL

SEQ ID NO: 25900 - protein, 59 aa, Artificial Sequence
  Synthetic
EKDVRELIKRVETALRESEEKLRRVAEELKKALDRSRKDLEEVVRRTEDLLRRLEEKLR

SEQ ID NO: 25901 - protein, 60 aa, Artificial Sequence
  Synthetic
SEEETVRRLLELLKENIEELRELLKRNLDLLRKLAEELKKLIEELARITERLAEKLAKDL

SEQ ID NO: 25902 - protein, 59 aa, Artificial Sequence
  Synthetic
EEEVRKLVEELRRAVKRVRDLLDELRRRLEEALRKSKRELETIEERTRRLLEDIKRDLD

SEQ ID NO: 25903 - protein, 60 aa, Artificial Sequence
  Synthetic
SEEEEIVKRLKELIKRNLELLDKTLKELKKTLEDIIRTLTELVKRAKEINKELIDRLREK

SEQ ID NO: 25904 - protein, 56 aa, Artificial Sequence
  Synthetic
REDIRRYEEKLRKLVEEVKKKLRDLEERLRRLVEKIRKLLEDSERRLRTMLDEIRR

SEQ ID NO: 25905 - protein, 61 aa, Artificial Sequence
  Synthetic
REKEEKVKKVREVVTELKRELDDMLRRVKEAHERLKKKHDDLLKEVREVHKRLKDRLDERG

SEQ ID NO: 25906 - protein, 59 aa, Artificial Sequence
  Synthetic
EEIKKTIEEIIKVLRELNDKLRRLSEDTIRVLEELNKEIARLLEKLVRDTKRLLDELTK

SEQ ID NO: 25907 - protein, 59 aa, Artificial Sequence
  Synthetic
SVKEVIKEVLDRVVKLIKDVIDALKTVLDRHLRLNRENIRALLEVLERILELLEELVRK

SEQ ID NO: 25908 - protein, 57 aa, Artificial Sequence
  Synthetic
LEKLLRKVRKIAKELADELRKLHREVKETHEDLKRKLDKLLKDIRKVVEDIKREVDR

SEQ ID NO: 25909 - protein, 60 aa, Artificial Sequence
  Synthetic
EKEELVEEILRRLKKMSERFSRVVEEILKLLEDSSRKVEEAIRRTIRELEKTLKRVEKDG

SEQ ID NO: 25910 - protein, 56 aa, Artificial Sequence
  Synthetic
SRELREAVKKVIADLEKILKDLRKLDKESLDKLREILKTLRDLDRKSLEELEEIRR

SEQ ID NO: 25911 - protein, 58 aa, Artificial Sequence
  Synthetic
SREEKLREDLDRVFRKNEEELKRVEKEVKKLLDDSKRKLDEVKKELEDLLEKIKRLLD

SEQ ID NO: 25912 - protein, 60 aa, Artificial Sequence
  Synthetic
DEELLRALKEVVRKVIEIVRRLLELHRETVKELARVIKEILRLHLESIKKLLDVVREVLR

SEQ ID NO: 25913 - protein, 59 aa, Artificial Sequence
  Synthetic
DEEEKVRRLKELLDRTLKKLKELVEEHDKILDELLKKLEELVRRHNKLLDDLLRRVEER

SEQ ID NO: 25914 - protein, 55 aa, Artificial Sequence
  Synthetic
EELEDTVRKLLETSKKLLDEAREVLERLHRRSEELLRRVEETLRRLEDEVRKITK

SEQ ID NO: 25915 - protein, 59 aa, Artificial Sequence
  Synthetic
DKEDKLRKIKELIRKLLETIKRLVEEHDKELDETLKKLEDLVREHDRLLDETLKRLEER

SEQ ID NO: 25916 - protein, 55 aa, Artificial Sequence
  Synthetic
EELERDLERLEKTSEDLLRRVKEEIDRLHERSKKLLDEARKKLEELLKTVKDIAK

SEQ ID NO: 25917 - protein, 60 aa, Artificial Sequence
  Synthetic
SEREELARDLDDLRRRLREAAEELKKKHEKLRRELEELAKELRKRHEELKKELDDAARRG

SEQ ID NO: 25918 - protein, 56 aa, Artificial Sequence
  Synthetic
EEVLKRILDKLMKVSEDVLRKLEDLLREVIELTKKVLDLLDELLKRVKKVLEEVMK

SEQ ID NO: 25919 - protein, 60 aa, Artificial Sequence
  Synthetic
DREKKVRDIEEDLKRVLDKLRRRVETSKEELKKVLKRDKENADELEKTLRDVVRELDRKI

SEQ ID NO: 25920 - protein, 56 aa, Artificial Sequence
  Synthetic
SEVAKELDEVIKRLLDNLKENTDRLKEVIDRNLKDLRDLAEELRRVIERLLEDARR

SEQ ID NO: 25921 - protein, 58 aa, Artificial Sequence
  Synthetic
DKEEVLKDIKRKLDDHRRRTDEIVERLERLLKEHEEKTRRLLEDVRKKLEELKEIIKR

SEQ ID NO: 25922 - protein, 56 aa, Artificial Sequence
  Synthetic
EEVLKRILDRIEELLRRLVKVNTDSLRELKRVVDELVKVDRESLRELERVLRELTK

SEQ ID NO: 25923 - protein, 60 aa, Artificial Sequence
  Synthetic
SKEEEIVRELEKILRDHLRKVERIVEDLEKLLDDHLKKIEELAKRLEEIIREAARKLEEK

SEQ ID NO: 25924 - protein, 59 aa, Artificial Sequence
  Synthetic
EEVKELLKRVEKLIDDVRKKVEDLHRELEKALRDIDRKVKRLNEELERLVEEVEEKVKT

SEQ ID NO: 25925 - protein, 57 aa, Artificial Sequence
  Synthetic
SESEELRRKLEELEKELRDVLTKDRKMLEDLKRRLDKLVKDSERRIRELKRRLDEKI

SEQ ID NO: 25926 - protein, 55 aa, Artificial Sequence
  Synthetic
REIVEELRKVIEDHERLVREILELLRKAIDDNHKLVRDLLERLKRALDETREDRR

SEQ ID NO: 25927 - protein, 58 aa, Artificial Sequence
  Synthetic
RETEETLKKLEKLLRKMLEVSKRLNEEDEKLLRTKRKLIEDLLRRVEELLEETRRVVS

SEQ ID NO: 25928 - protein, 56 aa, Artificial Sequence
  Synthetic
KDLVETLKRKLDKLLRDIRELAKDYKRKLDRLLEDVERLHRELKKELDELLKEVKD

SEQ ID NO: 25929 - protein, 59 aa, Artificial Sequence
  Synthetic
SELEKLLTDLERVIRKVVEDLRRLLEEHKKALDEDKKRDEDSNEELADAIRKVIEKLKR

SEQ ID NO: 25930 - protein, 56 aa, Artificial Sequence
  Synthetic
EEDTKRLLEKIHDDHRKLVEENERLLREDHKTLEDLIRKIKKLAEEILELTARETK

SEQ ID NO: 25931 - protein, 62 aa, Artificial Sequence
  Synthetic
DEREVLKEILDLVRRLLELALEILKRSLELLRRLAEEAKKVLDRSVELLRRLVREAKEAAKN

SEQ ID NO: 25932 - protein, 56 aa, Artificial Sequence
  Synthetic
DELVKEVEDRLRESEKKLERLLEDVERLLRENEERLRRLLEEVERLLRELAETLER

SEQ ID NO: 25933 - protein, 56 aa, Artificial Sequence
  Synthetic
SEKEEVEKRLKKVDEDTKRAVEEVKKAIEEVLRRHEEASKRVEEAIRRVLKELEDL

SEQ ID NO: 25934 - protein, 57 aa, Artificial Sequence
  Synthetic
REELLERLKELIKRLLEALKRLDEEVSKLIDELLKRLEKLAKEVLDLNRELLERTRR

SEQ ID NO: 25935 - protein, 60 aa, Artificial Sequence
  Synthetic
SDEERLDKVLKEAEDIIRELERLLRESLETLKRLIERLEKLLRDSLEELRRLIEDLARKR

SEQ ID NO: 25936 - protein, 59 aa, Artificial Sequence
  Synthetic
EDVVRMLKEVSRRDEELTRRLLRMAKKLLEDNEELSRRLVKKLDEVLKRVEEIIKRETD

SEQ ID NO: 25937 - protein, 60 aa, Artificial Sequence
  Synthetic
SREERIRKLAEDLKRKIEELLRRVRKLAEEHKRLIEKILEESERLAEELKRRAEELKKRL

SEQ ID NO: 25938 - protein, 59 aa, Artificial Sequence
  Synthetic
KEVLDELRRLLELLKKLVDRLLELNKRLNDHAKKLVEDLLRLLKKLLEEIKKLVDDARR

SEQ ID NO: 25939 - protein, 61 aa, Artificial Sequence
  Synthetic
SEEERLEEEVRRELERYRRTVRRLAEEVKEELERYEREVKKEEEKLEKTLEDLERELTRDG

SEQ ID NO: 25940 - protein, 57 aa, Artificial Sequence
  Synthetic
KKTIAEELKRVLRELTRILRELVKLNSDVVRRLLEVLTRLAKLSEDVVREILEIERE

SEQ ID NO: 25941 - protein, 59 aa, Artificial Sequence
  Synthetic
SEEEKLETVREELRRALERIEELITKNEKKIEDTLRDIRREIEENARTVKEALERIKKD

SEQ ID NO: 25942 - protein, 59 aa, Artificial Sequence
  Synthetic
KEKVDRTKEELERLKKEHRERVEETKRKLDELKKEHEREIRKTETDLRRLLKELADRAK

SEQ ID NO: 25943 - protein, 59 aa, Artificial Sequence
  Synthetic
SEDEKLRKLVEEVERTLKKLIDYLRENVEDVDRILRRLKELIDRHLKKVRELIEKLLRG

SEQ ID NO: 25944 - protein, 59 aa, Artificial Sequence
  Synthetic
KDTVREIEKDLEDSKRELERIKEEIEELLKRLEDKNERAIEEIEEDLKRLEERLREAAK

SEQ ID NO: 25945 - protein, 59 aa, Artificial Sequence
  Synthetic
SEEEKLRKTEEDLKRTLEELKKILDDHLRIIERLLREIKRVLEENKRNARRLLEEIKRS

SEQ ID NO: 25946 - protein, 59 aa, Artificial Sequence
  Synthetic
ERVLKRLEKELRDHLKRLEEIIKRLEEDLKKTLDELKRTIEDAERKLRDLERKVKEDAK

SEQ ID NO: 25947 - protein, 59 aa, Artificial Sequence
  Synthetic
SILERLVRELIRLLRELLRIHKELVERVIRVLERLLEVHKKLVETIERLLDKLAELVRR

SEQ ID NO: 25948 - protein, 56 aa, Artificial Sequence
  Synthetic
KREIEKVLREIKEELRRSLRELKRVLDEVKERLKESLERLRKLIEEIKERLDRIRK

SEQ ID NO: 25949 - protein, 59 aa, Artificial Sequence
  Synthetic
SLEEITKRLLELVEENLRRHEEILRELLELAKRLAKEDRDILEEVLKLIEELLKLLEDN

SEQ ID NO: 25950 - protein, 60 aa, Artificial Sequence
  Synthetic
ERTLREVVRKVLEEAKRLLDELEEVHKRVKKELEDIIEENRRVVKRVRDELREIKRELDE

SEQ ID NO: 25951 - protein, 60 aa, Artificial Sequence
  Synthetic
SKIEEVLERAKEVLDRLLDLHRRLVKEIEDVLDRSNELLDRLLKELEKVLDELLDIVRRR

SEQ ID NO: 25952 - protein, 59 aa, Artificial Sequence
  Synthetic
EEALKELKERIEEIKKTLRELLKELKKLNREIKETIKELSERLARAVEKIKRELEKLRK

SEQ ID NO: 25953 - protein, 60 aa, Artificial Sequence
  Synthetic
KAEEAVEKLVRIARAIVKINEDLSREVVRILREIVRLNEETTRLLVEIAREVVKVVEDAG

SEQ ID NO: 25954 - protein, 59 aa, Artificial Sequence
  Synthetic
EELLRRLEELRKRLEKVLDDSRKELEKLKRELERLLEESRRKLEKLKRDLERVLEETRR

SEQ ID NO: 25955 - protein, 59 aa, Artificial Sequence
  Synthetic
DDRRILKLLIDIIRKLVKLNEETADKLIRVIDELLKMAEESLKKVIDLVRTLVEIIRRE

SEQ ID NO: 25956 - protein, 56 aa, Artificial Sequence
  Synthetic
RKVVEELLRKVEKLIKDIRERYERLVKKVRDLVERWKELVRRLLKKAEDVIREIEK

SEQ ID NO: 25957 - protein, 58 aa, Artificial Sequence
  Synthetic
DEEDALRTIEELVKRVNEENKKILDESEDLVRRLNEKNERINKESRDLVKKLREDAED

SEQ ID NO: 25958 - protein, 55 aa, Artificial Sequence
  Synthetic
ERVLKLVEDAAREDERLNRELDRATREVAEEDKKLNEDIDKTLNDVIRELLEAAR

SEQ ID NO: 25959 - protein, 58 aa, Artificial Sequence
  Synthetic
SSVETIKKLVEDARKKLEDSIRKIEKLVRDVEKTLRDSLKRIRDLVEKVVRTLRELLR

SEQ ID NO: 25960 - protein, 57 aa, Artificial Sequence
  Synthetic
LEELVKRITDILREHVKMHEDLIRAIAKVLRDHVEAHKRLIKRITEILEEVVKAVTD

SEQ ID NO: 25961 - protein, 59 aa, Artificial Sequence
  Synthetic
DTKEEIKKLVEELLRLIEELIKRTEELNKEDNEIAERVVETHSRILRDLLRSLEEVART

SEQ ID NO: 25962 - protein, 59 aa, Artificial Sequence
  Synthetic
DDELREVLDRIRERVKRSEDKLREVLERLKRDSKRIHKDLRKALEEAKKDVDEIRKETE

SEQ ID NO: 25963 - protein, 56 aa, Artificial Sequence
  Synthetic
RREEELKRIIREIERILEELRRRSREIEEKLKKVLEEHERVSRRIKERVEDLKRKV

SEQ ID NO: 25964 - protein, 56 aa, Artificial Sequence
  Synthetic
EKDIERIVEEALKLHEDVHDENRRILEEAIRTHREVIKRLEEIVKEAIKLIEDVTR

SEQ ID NO: 25965 - protein, 56 aa, Artificial Sequence
  Synthetic
SEKELLEEIEKRAEEVLREHDKRSEEIKRELERVLKELRDLSRKIEEDLERLVREV

SEQ ID NO: 25966 - protein, 56 aa, Artificial Sequence
  Synthetic
KKDIERIVRELIKVHRDVLRKLEKVVREALELHDRVNKELREVVERALRLLREVTR

SEQ ID NO: 25967 - protein, 58 aa, Artificial Sequence
  Synthetic
SEEEILKKIEDRLRAITEKHERMLREIKKELKKVMDEHEDLLRKIEKELRDVLERLRR

SEQ ID NO: 25968 - protein, 56 aa, Artificial Sequence
  Synthetic
ATLLERIVERARRELTKNHDKLRKILERLERILRELNEDLRRILTTAVDILRKLRK

SEQ ID NO: 25969 - protein, 60 aa, Artificial Sequence
  Synthetic
REDEVLRDIERLLREIEEKIRRILEESTRELRKVEEEVKRIIERTKRELKKIKEDVERKG

SEQ ID NO: 25970 - protein, 56 aa, Artificial Sequence
  Synthetic
RDLLEKIKRVIREHIKALEKLARDLKEILRRHIEALKELARDLAEVIRKLLEDVKR

SEQ ID NO: 25971 - protein, 59 aa, Artificial Sequence
  Synthetic
DLERLVELLKRIDDEAVKLVRKLVEVLKRIDEELVRLVEELLRALRRINEEVVRLVKRV

SEQ ID NO: 25972 - protein, 56 aa, Artificial Sequence
  Synthetic
EELLKRLRRIVEESKRRVDELLKELRKISEDVAREVERLLRELERISREVKRRVEE

SEQ ID NO: 25973 - protein, 59 aa, Artificial Sequence
  Synthetic
SDEEVARELSDIVRKLVERNKESIEDAMRIVKELVDRNKKVTEDVLRLLEKLLEDVRDT

SEQ ID NO: 25974 - protein, 56 aa, Artificial Sequence
  Synthetic
EEFLRRLKEEVRKIVEKVKRDLERSLKELERILEEVKRMLERSLRELERVLKEIKD

SEQ ID NO: 25975 - protein, 56 aa, Artificial Sequence
  Synthetic
SKEEILRELEELSRRLVEKLKDLLRKLEKLSDEVVKELRKSLEELKDLADKMVKKL

SEQ ID NO: 25976 - protein, 55 aa, Artificial Sequence
  Synthetic
RLLEEIVKLLRDVAKRNLDLLEKHRELLERALEEVKRLLDEHLKLLRDALRRLKK

SEQ ID NO: 25977 - protein, 58 aa, Artificial Sequence
  Synthetic
SREDLLRKLKELIETILRKSSELLDRLLKLVREHSETSERLIRELKKILEDILKLIKG

SEQ ID NO: 25978 - protein, 56 aa, Artificial Sequence
  Synthetic
EKELRRIKEAVERVLRDHKRKNDKILRDVEEVLRRHLEELRRILKDVKKVLDEARK

SEQ ID NO: 25979 - protein, 58 aa, Artificial Sequence
  Synthetic
DDEELLKRLEDLDERLLRFSKENLEELRRRTRELIETSETLLERLREIIETILKVIRD

SEQ ID NO: 25980 - protein, 56 aa, Artificial Sequence
  Synthetic
ERFLEEIAERVERILKEHRELLKRIEDEVRRVLTEHKKKLEKLKREVERVAEETKT

SEQ ID NO: 25981 - protein, 57 aa, Artificial Sequence
  Synthetic
KETDEVVKRAKELVDTLLKVIKEHVERLKRLVEELLKVIRDHVRILRELAKRLREKV

SEQ ID NO: 25982 - protein, 59 aa, Artificial Sequence
  Synthetic
SDVERVLEELRRRLEKSVEEVERVLKRLKEELDKSVEEVKDVLRRLLEDLKRVVEELRR

SEQ ID NO: 25983 - protein, 59 aa, Artificial Sequence
  Synthetic
SEEERVLEEIKREIDRIVKRARELLEKYRELVERIKRRNEEILKKYEKLLEEIERLADA

SEQ ID NO: 25984 - protein, 56 aa, Artificial Sequence
  Synthetic
ERDLKRALRRHAEELTRLNKELNELLKEHEDELRRLLAELDRIVRKLLRTLKELTE

SEQ ID NO: 25985 - protein, 60 aa, Artificial Sequence
  Synthetic
SKEEEAKRVIDELREELRRILRENTELVKESERRITELLKENSDLVEEVRRRLEEVLEKE

SEQ ID NO: 25986 - protein, 55 aa, Artificial Sequence
  Synthetic
EDLKRLVDDVLRLAEESHRKIEELNRRTLKLMEDSHRKLKELVRKALELITELTR

SEQ ID NO: 25987 - protein, 59 aa, Artificial Sequence
  Synthetic
DSIERLAEELDKIVTDVLRVNEDSVRTWTRILEEVLRLNRELARILIDIARRVLELVKR

SEQ ID NO: 25988 - protein, 60 aa, Artificial Sequence
  Synthetic
EKELLDEVRRLLKRVKELLKRSIDLVEKILRDVKRLLDESIELVKRVLDKIRRLLEELAR

SEQ ID NO: 25989 - protein, 60 aa, Artificial Sequence
  Synthetic
SEEDEVLKTLDRKHKEAKKELDKVLRELEEEHKKVKRELDEVLKRLEDIHRRITELLRRG

SEQ ID NO: 25990 - protein, 56 aa, Artificial Sequence
  Synthetic
EEAVERVLKENKELIEEIVRLIRKILDENIELIRRIVRLLERLLRENLRLIEEARK

SEQ ID NO: 25991 - protein, 61 aa, Artificial Sequence
  Synthetic
SKEEDVRRLIEELVRELRRILEENRRMLKELVEKLEEVLRRSEEVWRRLAKELDELLKELN

SEQ ID NO: 25992 - protein, 59 aa, Artificial Sequence
  Synthetic
EEVIKKIEDLVRKTERELREVHKELRRLVEEAKEVVDRSVEILRDLVRKIVRILEESAR

SEQ ID NO: 25993 - protein, 58 aa, Artificial Sequence
  Synthetic
STEDELRKIKEELEDIRRRIEELDKKDNEDLDRIDEEIKRRLDKNIRDLDEIAKEVRK

SEQ ID NO: 25994 - protein, 60 aa, Artificial Sequence
  Synthetic
KEELAEITERLLKKYREVAEENMRSLKELLREYREVNTRTHKALERIIDRIREILEKVRK

SEQ ID NO: 25995 - protein, 59 aa, Artificial Sequence
  Synthetic
KEKEAIKEVAELLKRLIDDLLRLLKEDVDTARRVLDEIKKLLEENERIAREVLRRLRED

SEQ ID NO: 25996 - protein, 56 aa, Artificial Sequence
  Synthetic
ETDLDRIVKEMEKVLEDSIRELEKLVKRLEDILRESEKALRDLLRELRKVLEEVRT

SEQ ID NO: 25997 - protein, 56 aa, Artificial Sequence
  Synthetic
SSMETAVKLVKDLLREDIRSNEEHVRLAKKLLEEDIESNERLLRILKKLLDLVEKT

SEQ ID NO: 25998 - protein, 56 aa, Artificial Sequence
  Synthetic
REELRRVAEEIKRRAEELLRRTEELVRDILRRHEDALRRTEELVRRIEKRLRDATR

SEQ ID NO: 25999 - protein, 61 aa, Artificial Sequence
  Synthetic
RELEDVLRMIEELARRLVEILERHNKLSKRVIELLVRILEEHLKLVAELIKKAVEILRRIL

SEQ ID NO: 26000 - protein, 59 aa, Artificial Sequence
  Synthetic
DDIRKLLKELLDDVKKIIDDSRRLLDELRKELEKILKESEKLVDELREAVDRLIRKVRE

SEQ ID NO: 26001 - protein, 58 aa, Artificial Sequence
  Synthetic
SREELLKELRKLVEEIKRRSEELLRRLEKLLEDNERRTRELLERLKELLREIEERIRG

SEQ ID NO: 26002 - protein, 56 aa, Artificial Sequence
  Synthetic
RDIVRELTELVRRLLKRVEELLKRSLEILRELIKAIADAIKESLDILDRLLREVAR

SEQ ID NO: 26003 - protein, 59 aa, Artificial Sequence
  Synthetic
EEEEVLRRLRELIERLVRETEEKLKEIERRIEEVLERHRRALEELKKEIDEILEEAERR

SEQ ID NO: 26004 - protein, 60 aa, Artificial Sequence
  Synthetic
EEALRRLVEKVKRVLEEILKVSEEVLEKVKKVLTDILKRLKELVERNVRLLERILDEARR

SEQ ID NO: 26005 - protein, 57 aa, Artificial Sequence
  Synthetic
SKIEKLLRVIKKIIDKLEELLKRLLEVVRESIELLKRILDELLKVVERTADELRRIV

SEQ ID NO: 26006 - protein, 59 aa, Artificial Sequence
  Synthetic
KDLERLLRKVKEDNDRVKKEVERLLKEIEDRNRKVVEEIKRRLEEIKRELDKVVEEIRR

SEQ ID NO: 26007 - protein, 57 aa, Artificial Sequence; identical to SEQ ID NO: 26005
  Synthetic

SEQ ID NO: 26008 - protein, 59 aa, Artificial Sequence; identical to SEQ ID NO: 26006
  Synthetic

SEQ ID NO: 26009 - protein, 59 aa, Artificial Sequence
  Synthetic
KDEDKLRRIVAVLEDLIRLTEELAKILKRVTERLKELTEELKRRNEKVVEEILKLLRDS

SEQ ID NO: 26010 - protein, 56 aa, Artificial Sequence
  Synthetic
EEVVRRIRELATKNLDDNRKALEESRRIIEEIVKRIKDVIRTSREIIKELRKEIRT

SEQ ID NO: 26011 - protein, 56 aa, Artificial Sequence
  Synthetic
KEAEELVEVVRKHIKTLAEIWKKLVDALRKHVEILRRLLKELVEVIRRAIERVRRD

SEQ ID NO: 26012 - protein, 55 aa, Artificial Sequence
  Synthetic
ERLDTVLEELRRVLKELERKLRESIKELRDVLREVEERLKESIEELERVLDRLRR

SEQ ID NO: 26013 - protein, 57 aa, Artificial Sequence
  Synthetic
SEEEIAERVKDLIRRVLEEHERSVKKVEDLIERVLREHRRVLEEVRRLAEELERRLG

SEQ ID NO: 26014 - protein, 59 aa, Artificial Sequence
  Synthetic
DRRKDDLRRVLEELLKRLKELLEELKRINEELLKTLEKLARDNLEINKELIKRLDEETR

SEQ ID NO: 26015 - protein, 59 aa, Artificial Sequence
  Synthetic
SEEDVLRKLEEIVEELERSNRDAVRRLEEVVKRVEDLWEEVVRRLRELVREVEERLRDV

SEQ ID NO: 26016 - protein, 55 aa, Artificial Sequence
  Synthetic
KEIEEIIERVLRLLAELLKRVKRISEDLKRLLDELIEENADILRKLDELVTRDET

SEQ ID NO: 26017 - protein, 60 aa, Artificial Sequence
  Synthetic
DKERIIKRVLDELKEALKKAEKLHEDVLRELRRLLDEALKLHEDVLRELEELLRKIESTL

SEQ ID NO: 26018 - protein, 59 aa, Artificial Sequence
  Synthetic
REKVEELADEIRRVVKRIEERHDKLRKDIERLVRRIEELHKRLLEELEELVKRITEELK

SEQ ID NO: 26019 - protein, 57 aa, Artificial Sequence
  Synthetic
SVLETIVDIVRKLIELIEKLLRDLLELDKRNVDAVARNADKILKIAEDIVRTIASKG

SEQ ID NO: 26020 - protein, 55 aa, Artificial Sequence
  Synthetic
EDLKRELDRLIKEIEESNRRLKKTTKDLVDEVERILRKIKDDIEDVKRKIEEDKR

SEQ ID NO: 26021 - protein, 59 aa, Artificial Sequence
  Synthetic
SEDELLDRLDESVKEVLDRHRKLLEDLADTIRRVIKKVKDLLDEHKKTLEDVIEKVLRR

SEQ ID NO: 26022 - protein, 59 aa, Artificial Sequence
  Synthetic
ETVVRDLRRLLEELRRISEEIVRDLRRLLEELKKIVEDVVRESKKLLDDLRRIIDETVR

SEQ ID NO: 26023 - protein, 59 aa, Artificial Sequence
  Synthetic
SRAERLADEVRKAVKKSEEDNETLVREVEKAVRELKKNNKTWVDEVRKLMKRLVDLLRD

SEQ ID NO: 26024 - protein, 60 aa, Artificial Sequence
  Synthetic
SEELVRIAIEVLKRLLEIIEELVRLNNEILERLLKIVRELHKDNIKILEDLLRIIEEVLR

SEQ ID NO: 26025 - protein, 57 aa, Artificial Sequence
  Synthetic
SEVETLIRLIEENLRLLKEVADLSLEVIERLLRILKEIVKRSLDVIRRLLKLIEEVL

SEQ ID NO: 26026 - protein, 55 aa, Artificial Sequence
  Synthetic
ERAKKRLEDLLREHREILKEVVKRLKELLDRHRKLLDEARRESKRVLDEIDEKTK

SEQ ID NO: 26027 - protein, 57 aa, Artificial Sequence
  Synthetic
SRVETLIRVVEKNLELLREIVERSLRVIKKNLRLLEEVARLSLKVIKELLEEIKRRV

SEQ ID NO: 26028 - protein, 55 aa, Artificial Sequence
  Synthetic
RRVKEELKRLLEKHRELLKEAVKRSEDVLKEHKEVLDDVRRESEKVLEELRRAET

SEQ ID NO: 26029 - protein, 61 aa, Artificial Sequence
  Synthetic
SEKDEVTRRIRELLKEAEETNREAIERIKRLLDRVREKVEEVAKRSEELLRRLKKVLDRDL

SEQ ID NO: 26030 - protein, 57 aa, Artificial Sequence
  Synthetic
KEDLLREIARILRESLRLIRELLKEIEKIVKEIIELLERLNDELRKIIEKILETTKK

SEQ ID NO: 26031 - protein, 59 aa, Artificial Sequence
  Synthetic
SRKELLKKLREVLETNLKLIEDLVRDIERALEEDRKLIEDLLRRIEEVARRILELRERG

SEQ ID NO: 26032 - protein, 56 aa, Artificial Sequence
  Synthetic
DKRLREVIKRLIEELRRLLKEYEDVLRKVREDLKKLLEEYKRVLERVDEELRKRDK

SEQ ID NO: 26033 - protein, 59 aa, Artificial Sequence
  Synthetic
DEEKRVEDVLRRVEDLLRKLEEEHRRIVKRIRDELRESERKIEELVDRLRKEIDRIRKT

SEQ ID NO: 26034 - protein, 57 aa, Artificial Sequence
  Synthetic
KEDLLRRTEKVEREIRKTLDDLHERTRRVVEETLRKNEELLKEIKRVVETILDEIRK

SEQ ID NO: 26035 - protein, 57 aa, Artificial Sequence
  Synthetic
SKKETLVKLAEEIIADIHRVNRESLELIKRLIERVEKLTKESLDSIRKLIERILRDI

SEQ ID NO: 26036 - protein, 55 aa, Artificial Sequence
  Synthetic
DEVREIKEKVRELIDKDRRLVKEIEDLAREILDTDRKLVKRLEEVVRELIERARR

SEQ ID NO: 26037 - protein, 59 aa, Artificial Sequence
  Synthetic
DEERVLTEIEKLVKRLKDRNDEIRRELEKTSKRLEEELERIERELDRLVEELKKELERT

SEQ ID NO: 26038 - protein, 56 aa, Artificial Sequence
  Synthetic
DKDLEDLIRRVLTRVKELARRLDRKNKELLKEIERLIREDKETADRVKTEIKKKTD

SEQ ID NO: 26039 - protein, 62 aa, Artificial Sequence
  Synthetic
DEEELVRRVEKLARDIEETLERLVKELERLYREIEKELKRLVKELEDANRRIVKRLKDLFDK

SEQ ID NO: 26040 - protein, 60 aa, Artificial Sequence
  Synthetic
DEEVLRRIEKLNKELEDVLREVEERIRKLLRELEEVSRRVTERIKRLEDELRKAFEEVTR

SEQ ID NO: 26041 - protein, 64 aa, Artificial Sequence
  Synthetic
SKKEDAIRKARKLLERIRRLADKAIKRSRRLLERVRELVKESLDILRKLLERLRDLVRKIKKDG

SEQ ID NO: 26042 - protein, 55 aa, Artificial Sequence
  Synthetic
DELRRLTEEILKLHEESVKKLEDLTKEALEASEDVHRKLEKLTEEILRRTEEAEK

SEQ ID NO: 26043 - protein, 59 aa, Artificial Sequence
  Synthetic
KEKEEADRELRELKREMEDILREVEKELRELLKKSEELLEEIERLSKELTDEAREVERN

SEQ ID NO: 26044 - protein, 56 aa, Artificial Sequence
  Synthetic
RELARKLLKRLKELNDRILETLRRLNEETARLVKEVLDTARRLLEELIRVLDETRT

SEQ ID NO: 26045 - protein, 64 aa, Artificial Sequence
  Synthetic
SKEDRLREILTELKEVIDTILRKLEEDARRLKKAHEESNEKLKRIVEDLERVLRELLRKLKERV

SEQ ID NO: 26046 - protein, 56 aa, Artificial Sequence
  Synthetic
KELLDKAKEIVDRVTEEVERILEENERLWRESIKDVKRILDEAREIVRRLLEEVRK

SEQ ID NO: 26047 - protein, 56 aa, Artificial Sequence
  Synthetic
DESEKVKEILERIERSLREVKRRVDEVLKRIKELLEELKRRHDESVKELKRILEEI

SEQ ID NO: 26048 - protein, 60 aa, Artificial Sequence
  Synthetic
GEELAKTLEKLAKELLDANRRLVDTSVKLVKRLLEIVAELVERHKESNRRLLKLIEDRDR

SEQ ID NO: 26049 - protein, 56 aa, Artificial Sequence
  Synthetic
SEEDILRRVVEELERLIKEAKEIIEEIRRLHEELDRKSEELLDRLLELLRDLLRRL

SEQ ID NO: 26050 - protein, 59 aa, Artificial Sequence
  Synthetic
KDKVRRLDELVKELLERLRRLHEENTEEVERVLRESARLLDDLLRKVEEVVEKIKEELR

SEQ ID NO: 26051 - protein, 56 aa, Artificial Sequence
  Synthetic
SREELVKDILRLLTESNDEHKKLSDKLVDLVRKLIELAEKLTEEVVDLVRRLLEEL

SEQ ID NO: 26052 - protein, 59 aa, Artificial Sequence
  Synthetic
EDAKELLKKVKEIVDELVRRHKKLVDEVREVVERVVREHRELVKKDRRLVDEVLKRLRT

SEQ ID NO: 26053 - protein, 56 aa, Artificial Sequence
  Synthetic
SREDLTRETERLLRESNEKHKELTKEIIRLVDRLIKLLEELTERLKELVKELLKRL

SEQ ID NO: 26054 - protein, 59 aa, Artificial Sequence
  Synthetic
EDAKKLVKEVRDVVERVRREHDKLVKEIEKIVRDIEKKLRDLVREDRELVKKIEKKLRD

SEQ ID NO: 26055 - protein, 59 aa, Artificial Sequence
  Synthetic
SAEDLVRRVKDLVDKLEDKLRKVVRTNERLWEEIRKRLEELVRRNKELWDRLVEKLKAG

SEQ ID NO: 26056 - protein, 56 aa, Artificial Sequence
  Synthetic
IRVLVELVRRHNKVLKELVEELEKLVRDHNRVVEEVVRELVELLRRAVEVIKEVVK

SEQ ID NO: 26057 - protein, 62 aa, Artificial Sequence
  Synthetic
REKEVIDDVRRMLEDLLRTIRRVIEENKRIVKESSDHIREVLKRVLEVLRRLLEEVKRLTER

SEQ ID NO: 26058 - protein, 60 aa, Artificial Sequence
  Synthetic
RKDVERELEKIIREVEERLRRVKEKLDDIDRRAKELHEEVMKRLEELVERIRRLLEDVER

SEQ ID NO: 26059 - protein, 62 aa, Artificial Sequence
  Synthetic
SDEEILREILKTLEDVVRRLEELLKENEKLIRESTKLIKDVLDELLEIIKRVAKLIRDLKRN

SEQ ID NO: 26060 - protein, 60 aa, Artificial Sequence
  Synthetic
EETVERKLKKLLDKARTELEKIKRRLDKLNEDYERKLRELEKRLRDLLERLRKTLEDIRK

SEQ ID NO: 26061 - protein, 60 aa, Artificial Sequence
  Synthetic
SEIEKILEELKRLVERVLKLNEDIARRIAELVKKDLKLIEDLLRELEDLVRKILDALRKK

SEQ ID NO: 26062 - protein, 56 aa, Artificial Sequence
  Synthetic
KDKVVEEIRRLLKRLKEEAEKVARESEELLRRIREASKELAERAKDLLRKLDEAVR

SEQ ID NO: 26063 - protein, 62 aa, Artificial Sequence
  Synthetic
SDEERILDTLRRIIEDLLRLLREALRRHEELLRRNIELIRRVLETIKEVLRRLLKLLLEVAK

SEQ ID NO: 26064 - protein, 60 aa, Artificial Sequence
  Synthetic
REELDRLLEDVRRVIEELKKLVREVLERSERMVKEVRDLWRDLKRRIEEAAERIKDELRR

SEQ ID NO: 26065 - protein, 61 aa, Artificial Sequence
  Synthetic
SERELLEKVRKVAEENIRILEEVLRKIAEVVKEDLKLLKELLEATERVVEELLKRIVEKKK

SEQ ID NO: 26066 - protein, 55 aa, Artificial Sequence
  Synthetic
ETLERLLEELERLVKEVVERSERLLKKLLEDVRRVAEELVKSVEDLLKDIEREVT

SEQ ID NO: 26067 - protein, 59 aa, Artificial Sequence
  Synthetic
REKELVDDIRRILEEILRLLRRLLEEVIRLLEENEKLVRRHLKTVIDILRRVAKLLDEN

SEQ ID NO: 26068 - protein, 56 aa, Artificial Sequence
  Synthetic
DSLVREVEELIKRLEKHIDDLLKTSRDLVKRVLDLVDEVVKRVEDLVERVKEKIDT

SEQ ID NO: 26069 - protein, 62 aa, Artificial Sequence
  Synthetic
DEERLAEELERVLDRNRKLLEEALRELRRVIEENRKSVKRLLDELKRVLDELLKVLRELSRD

SEQ ID NO: 26070 - protein, 56 aa, Artificial Sequence
  Synthetic
EEDVERAVKEIRDRLRKLLEDYERAVRRLEDKLRRVRERYEKVLKRIKDKLEETKR

SEQ ID NO: 26071 - protein, 62 aa, Artificial Sequence
  Synthetic
SREEVLRELEEVIEDNRRLLEELIEKSKKVLDESLKLIDELLRRLEEVLERVLRLLEELSKL

SEQ ID NO: 26072 - protein, 56 aa, Artificial Sequence
  Synthetic
EDDLKRVVDEVEKKLRELKRRYKEALERIKEKIKELKDRYERAVREVVAELRKTTK

SEQ ID NO: 26073 - protein, 56 aa, Artificial Sequence
  Synthetic
KKDEEIREKLDRLLEENRRALEEITTRLDDLLRRNKDALRKVMEKLKRLLDDLRRA

SEQ ID NO: 26074 - protein, 55 aa, Artificial Sequence
  Synthetic
ERVKEILERILRVVEEAVRLNEESLRRILDVVRKAVKLDRESLKKILDVVEEAVR

SEQ ID NO: 26075 - protein, 61 aa, Artificial Sequence
  Synthetic
SRVEELKKLIEDILRISREVVERIKRVAEDIHRINRRVLDDLRKLIEDILRTVEEILARKV

SEQ ID NO: 26076 - protein, 55 aa, Artificial Sequence
  Synthetic
DEVEREIRRVKEDLDRILEEYRRLLEEIKRKLEEILRRVEELHRRLRRKLEEIDR

SEQ ID NO: 26077 - protein, 60 aa, Artificial Sequence
  Synthetic
SRVEKVLELLKRIIEILRELVKVHLDVLRHNDELLKRIVEDLKRLVKKLVDILKEIVEKR

SEQ ID NO: 26078 - protein, 55 aa, Artificial Sequence
  Synthetic
EEALERLKRLLEEIRERLEELKKRLEESLKRHEEEVRKLLDKLRRLLRRAEEEAR

SEQ ID NO: 26079 - protein, 58 aa, Artificial Sequence
  Synthetic
SKEDELRKVLETLERLARELEELNKKILDDLKKLIEELRRHTEEVMRRLKELADELRK

SEQ ID NO: 26080 - protein, 54 aa, Artificial Sequence
  Synthetic
EVVRVLEELLRLVRDNVRRLDEILKELLRLVEESVRTAEEILKELLRLIKELAR

SEQ ID NO: 26081 - protein, 59 aa, Artificial Sequence
  Synthetic
SIEELVDELLKVLKEVVEETAKLLEENNRRLKKITDDVRRLNEDTIRRLREVVKELETK

SEQ ID NO: 26082 - protein, 56 aa, Artificial Sequence
  Synthetic
DDKARKALEDLERELRDVDRRSDEEATRLHEEHKKALDRYVKELKRVLDKMKEDTR

SEQ ID NO: 26083 - protein, 59 aa, Artificial Sequence
  Synthetic
SEKELVDKLIKLLEDVVKKLEDIARDNNRILKEIADRVKELNERTVEEIKRVIEELRRK

SEQ ID NO: 26084 - protein, 56 aa, Artificial Sequence
  Synthetic
EEKLTRAAEDLLRKLRRVDEESDKKLREVHRKHKEALEEVKRRLKEITEEADRATR

SEQ ID NO: 26085 - protein, 62 aa, Artificial Sequence
  Synthetic
SESELIRELEKLVKEIVDELERLLRNNIRLLEEVAKTLIRLLENNIELLDEILRELERLSKE

SEQ ID NO: 26086 - protein, 56 aa, Artificial Sequence
  Synthetic
EEEVRRTIERLKEEHEDALRRLKEILEELKDEHRRVLKRVKDKLRELKRRLEEREK

SEQ ID NO: 26087 - protein, 57 aa, Artificial Sequence
  Synthetic
SEREELERLLKELEDVTREVVERLKKLLRDNEKLTDEVRKRLRDLLRRLEEMVRRRG

SEQ ID NO: 26088 - protein, 56 aa, Artificial Sequence
  Synthetic
EEEIEEIVKRLVEVLEKVLRELERASRKLVKVVEEVLRALEEISKELVDVVREVLR

SEQ ID NO: 26089 - protein, 60 aa, Artificial Sequence
  Synthetic
DEDRRLEDAVRKLRKEHKDIMKKLDDIMRELDEDHRRIKERLDRILEELKKLLTRVLRET

SEQ ID NO: 26090 - protein, 54 aa, Artificial Sequence
  Synthetic
EIERIIRRVIEVIREILDLVRKVNKKALRVIEEILEDLARVNKKAVDAIDELRK

SEQ ID NO: 26091 - protein, 58 aa, Artificial Sequence
  Synthetic
DEERLLKTILDVIRKVLKESKDILRRVEEILRRVIETAKEIHKEVKEIIEDVLRLLRE

SEQ ID NO: 26092 - protein, 60 aa, Artificial Sequence
  Synthetic
EEEIEKRVREIKKEVEDLLRRSEELLKELLDRIRKLLEELKKRHEDLLREVKKDLDEIRR

SEQ ID NO: 26093 - protein, 61 aa, Artificial Sequence
  Synthetic
DEVEELLKRVRELLKRSEELVRKILEDVKRLLERSIEEVEDLLRKVEELLKRLLDLVERRK

SEQ ID NO: 26094 - protein, 56 aa, Artificial Sequence
  Synthetic
EDLDRDVDRVLKEIMDLLRDLVRRTKELLEELLRLLEELVRRHKELVRKILDEIRK

SEQ ID NO: 26095 - protein, 59 aa, Artificial Sequence
  Synthetic
REAEELLRELEELLKKSEKVLEDLLRKNRELIKDSKRRLDEVRRKVEKLAEEVEEVIRR

SEQ ID NO: 26096 - protein, 56 aa, Artificial Sequence
  Synthetic
KDAVRKLIEELKKLLEDLVEHHERLLKEDHERLKRLLDHHRELLKTVLTILRETAK

SEQ ID NO: 26097 - protein, 59 aa, Artificial Sequence
  Synthetic
ELDEILRKVVEDSRRLVKELEDILREVIERTERILEEHRDLTRKADEDIRRILEEATRT

SEQ ID NO: 26098 - protein, 57 aa, Artificial Sequence
  Synthetic
KEEVLKDIVRVLRDVLKKANDLLKTHLDLNRESVKKVVEIARRHVKMNEDSVRKVEK

SEQ ID NO: 26099 - protein, 59 aa, Artificial Sequence
  Synthetic
DVEDVLREVVERSRRLVEEHKRISEKVIRDTKRILDEHRELTERVIRRAKKLVDDARRT

SEQ ID NO: 26100 - protein, 57 aa, Artificial Sequence
  Synthetic
KEEVLKDAVRVLEEILRKLNELLERHLKLNEESLERMNRILTRHVKLNKESADDARR

SEQ ID NO: 26101 - protein, 59 aa, Artificial Sequence
  Synthetic
DEEELLRRVTEELKRLLDEARKLHEDVKRELEKLLKENDDLLRDVKRKLERLLEALKRG

SEQ ID NO: 26102 - protein, 57 aa, Artificial Sequence
  Synthetic
KDKLLERIRRLLETLLEVLKRDNEEIKRILEELLRVAEENLRRIKEIIDRLLDATRR

SEQ ID NO: 26103 - protein, 59 aa, Artificial Sequence
  Synthetic
DEEEVVKRLADVLRENDETIRKVVEDLVRIAEENDRLWKKLVEDIAEILRRIVELLRRG

SEQ ID NO: 26104 - protein, 59 aa, Artificial Sequence
  Synthetic
EDVKRALEELVKRLRKLLEDVKKKSEDIVREVERIVRELKKRSDEILKKLEDIVEKLRE

SEQ ID NO: 26105 - protein, 56 aa, Artificial Sequence
  Synthetic
KEREEIRERVKRILETSRKLLEELAKAVEDVLRRSKELIDELRDAVRRVLEELERG

SEQ ID NO: 26106 - protein, 59 aa, Artificial Sequence
  Synthetic
DRTKKIVERIIELIEELLRLLVKVVEDSVRLIEELLKLAEEVAKRSLKLIEDLLRAIEK

SEQ ID NO: 26107 - protein, 58 aa, Artificial Sequence
  Synthetic
SDDEVIEKVKEDLRRLIKEAEDVVREYEKRLREVEKKLDEVVKESERLLRELLKKLEA

SEQ ID NO: 26108 - protein, 60 aa, Artificial Sequence
  Synthetic
KKELIKILRDLARKHRELLKRLKELTREHLKRVREILEELLRVTRELVEEIDKILKDLKK

SEQ ID NO: 26109 - protein, 58 aa, Artificial Sequence
  Synthetic
SEDEVLERIRRALERVEDEHRKVLEKIVEDLKDVLEKHKRVLEEAKRDLERIKEDADK

SEQ ID NO: 26110 - protein, 60 aa, Artificial Sequence
  Synthetic
EKSLKDLLREVLERSKKLLEEHHKHLEEIVRRTKELLERHHRHLKEIIRRIEEILKRERD

SEQ ID NO: 26111 - protein, 59 aa, Artificial Sequence
  Synthetic
SKEDELREVLERVKRLIETVKRALDEALDRTRRLIEELDKTSKRVLTTVKKLIEDARRE

SEQ ID NO: 26112 - protein, 57 aa, Artificial Sequence
  Synthetic
ERDLLRELLRIVKEHVDEVRKLLDELRKVNEKIVDAVRKILEKLLKIATDAIEETRK

SEQ ID NO: 26113 - protein, 61 aa, Artificial Sequence
  Synthetic
SEKERLMEEIKRVAEELRKTVDRLRERNEKVVRDIRETVREVEREHEDVVKELADRVRELR

SEQ ID NO: 26114 - protein, 62 aa, Artificial Sequence
  Synthetic
EEVREVLRRLTKILRDLLKRNKEIMEKLLRDLKELLKENKKALEDLLRKLEELLRRIAEAEK

SEQ ID NO: 26115 - protein, 57 aa, Artificial Sequence
  Synthetic
SKEETTKRLLDRHLERDRELLDRAARTNEEILRRNREVLKELFELLKRILDRVREAN

SEQ ID NO: 26116 - protein, 59 aa, Artificial Sequence
  Synthetic
EEVLRELRELLKRLKKRLEELLREHEKLLEDYKDRLRKSDDDLRRSVEEIKKALDRLRK

SEQ ID NO: 26117 - protein, 57 aa, Artificial Sequence
  Synthetic
SKLEDSAEKLKEHLKRDRELLKRAEDLLREILRRNREVLDELRRTLDDILRRIREEN

SEQ ID NO: 26118 - protein, 59 aa, Artificial Sequence
  Synthetic
KEVLDRLEKLLRDARKRLKELLDEHEKVLEDMERRLRESLDDLRRSLDRIRKDLKRKTD

SEQ ID NO: 26119 - protein, 62 aa, Artificial Sequence
  Synthetic
SEKERTKELLERLLKLIRELLKKLEDLNRDLLRRVKEVLDRLAELNEELLRRVEEVTRLRDE

SEQ ID NO: 26120 - protein, 60 aa, Artificial Sequence
  Synthetic
KEKLTKLIKEIKERSKRLLEEVKRALEEVMKKNEKILRDVRDDLRRAREELREILREADD

SEQ ID NO: 26121 - protein, 60 aa, Artificial Sequence
  Synthetic
REEEKLKETLERILRELEKLAKENKELLERILKRDEDLTRENKETLDRLLKRVEEVTRRK

SEQ ID NO: 26122 - protein, 60 aa, Artificial Sequence
  Synthetic
DREVEKVLRDIKRKIKEIVDEHRDMNRKIKEEIDRIDTEYKKSLKDIKKEIEEVLDEARQ

SEQ ID NO: 26123 - protein, 59 aa, Artificial Sequence
  Synthetic
RKEEAIERIRREIEKVRRRLREVHKESEERIRRLEDEYRRALETSAELIRRILDELRKN

SEQ ID NO: 26124 - protein, 59 aa, Artificial Sequence
  Synthetic
KRVKDIVRKILRVIEENLKFVAEAVKKLKEIIERNLRLLEEIAKLLLDILEEVLKRLTT

SEQ ID NO: 26125 - protein, 59 aa, Artificial Sequence
  Synthetic
REKEVIEDIKRLLDEILKRLEEANKETEERLEKLRKEYRELLEDSKRKIKDIEAELRRL

SEQ ID NO: 26126 - protein, 59 aa, Artificial Sequence
  Synthetic
EAVKEIVKRLKEVIKDNLRVVEELVRKLKEIIEDNLRVLREIAKLLKDVLEKLLRDVRK

SEQ ID NO: 26127 - protein, 56 aa, Artificial Sequence
  Synthetic
DKDKRLEELLKRLKELNDKTFEELERILEELKRANERSLREAERILEELRRRIEER

SEQ ID NO: 26128 - protein, 59 aa, Artificial Sequence
  Synthetic
KDVKDIIRTILEVARDLLRLLEEDSRTNSEVVKRLLDLLREDSKANSEVVKRLLDVLRE

SEQ ID NO: 26129 - protein, 56 aa, Artificial Sequence
  Synthetic
SKEETLKRLLDELEKRNRETVERLERLLKELEDRNRRSLEELERVLEELERKIEES

SEQ ID NO: 26130 - protein, 59 aa, Artificial Sequence
  Synthetic
REVKDIVRKMEEVIRRLIEILRRDVELNLDVAKKLLELLKEDSKLNLDVARELLELLDR

SEQ ID NO: 26131 - protein, 57 aa, Artificial Sequence
  Synthetic
RELELLDELLRRTERLVKEYLRVSKELLEETLKLLTELLKLSKRLLEETERLLRRDK

SEQ ID NO: 26132 - protein, 60 aa, Artificial Sequence
  Synthetic
KTELLEEAVKRLETLLRRYKEEIRRVAKRLEELLRELNELSKRLEETLKKLLEDLREDAR

SEQ ID NO: 26133 - protein, 57 aa, Artificial Sequence
  Synthetic
DEEETLRRLLERKVELAKEYLDVSKEVIDRTTKLLDEYLKTSKRIVDKTVELLERDD

SEQ ID NO: 26134 - protein, 60 aa, Artificial Sequence
  Synthetic
LRERLEEARRRLEELLRELNEITKDLERKLEKLLRDLNELTKRLEEELKRLLDELKKRTD

SEQ ID NO: 26135 - protein, 61 aa, Artificial Sequence
  Synthetic
SEEDELVKRLRELVKELIDAIREHLRRLEELLRELLKALEDHLRKLAELVRRIIEELRRTN

SEQ ID NO: 26136 - protein, 59 aa, Artificial Sequence
  Synthetic
EELKERIRRIVETIRRSLERLKEEADRIVKEIEKSLRELEERLERIVDTIRKLLEDAKR

SEQ ID NO: 26137 - protein, 61 aa, Artificial Sequence
  Synthetic
SEDDVLRKLLEAIKKLLKETKEILDRYLRESDRHNKALREILERLLELIKTLLEDLVRRTG

SEQ ID NO: 26138 - protein, 59 aa, Artificial Sequence
  Synthetic
EEALKEIKRKLRELEKEIRKVVEDSRRISEESLRRLEKALEDIERILKKLSDEIRTDAT

SEQ ID NO: 26139 - protein, 58 aa, Artificial Sequence
  Synthetic
DEEEVTKEVERLNRELLKRLREIVEETKDLNRRLLEILEELVRRTEKLLKDVLEIRKR

SEQ ID NO: 26140 - protein, 56 aa, Artificial Sequence
  Synthetic
KDRLREELKKLLEELRRVLEDAKRKSEELSRRLEEVLRRAEEKNKEIMDRIRKARE

SEQ ID NO: 26141 - protein, 57 aa, Artificial Sequence
  Synthetic
KEKEELLEEVERKVTELKKRSEDLVRKLDEEVKRLEREHEELLKKLRDAVEELRRAK

SEQ ID NO: 26142 - protein, 60 aa, Artificial Sequence
  Synthetic
RETVLRKIIRLVEELLKILARINEEVKKLIRKLLEILTRINKKMIEVIDELVKIIREAAT

SEQ ID NO: 26143 - protein, 56 aa, Artificial Sequence
  Synthetic
SEEERTKESLKKVLKALVDLNRELLRKLEENMRELTKLNEEVKRKLKEVLDKVREN

SEQ ID NO: 26144 - protein, 59 aa, Artificial Sequence
  Synthetic
EEIRKIVEEILKEIKELADRYREEVRKSKDKLRRILEDYKRKVDELKERLRELIEEVET

SEQ ID NO: 26145 - protein, 59 aa, Artificial Sequence
  Synthetic
SLKELAEEVLRRILELLRRIIEIHERSLERSNRTLKKLIDEIERVMREILETLKRALSI

SEQ ID NO: 26146 - protein, 56 aa, Artificial Sequence
  Synthetic
RTLLEEIRRRVEKVIREARETLREHRERVERSIEELRRMLEDVERIVREAIERLRR

SEQ ID NO: 26147 - protein, 61 aa, Artificial Sequence
  Synthetic
SEVEDILRRLAELNKRLIDKLRELIDRIRRLNEELLRVVEDILRRLKRLADELIRVVRERG

SEQ ID NO: 26148 - protein, 56 aa, Artificial Sequence
  Synthetic
DEDLKRLLEKLKEDVERVLKEVRDRTRESLKHLEDVIRELEKKTEDSLRHMEERRK

SEQ ID NO: 26149 - protein, 57 aa, Artificial Sequence
  Synthetic
SKEELVKEALEENVRSVEEVIKLLKDALDENLKVVERVIRELKRALERVKDVIRKLI

SEQ ID NO: 26150 - protein, 59 aa, Artificial Sequence
  Synthetic
KKVADELKKLLDELKKILEEIRRMLEEANRKHDDIVRDIRRVLEENDRKLEKIADDIRR

SEQ ID NO: 26151 - protein, 57 aa, Artificial Sequence
  Synthetic
SKKEELEKLLDTNLTEIRRLLKRVKDVLDRNLEVVRRVIEELARLLDEVTEVVRRLI

SEQ ID NO: 26152 - protein, 59 aa, Artificial Sequence
  Synthetic
EKVKRELEKLIKRVKDILDDIRRRLKKVNEEHEREADRLRRELERLDRELKKRMDDIRR

SEQ ID NO: 26153 - protein, 56 aa, Artificial Sequence
  Synthetic
DEDEELKERTKKSLEKLRRLLERLEKIIRESLDKLRDLLRLLEEALKRILDELRRN

SEQ ID NO: 26154 - protein, 56 aa, Artificial Sequence
  Synthetic
RDKLEKIERDIRKIIRDLEEIARRLKEDHERVIKELRETVKKHKEDLEEVIRELRR

SEQ ID NO: 26155 - protein, 55 aa, Artificial Sequence
  Synthetic
REKEDVARRIKRIHDELETRIRKLARDLERIHRKLKEDIERLVREAEKKLRELEK

SEQ ID NO: 26156 - protein, 55 aa, Artificial Sequence
  Synthetic
EEIERLVEELKKILETILKLIAELNEEVVRLLEDILRLVRELNERVAELLERAEK

SEQ ID NO: 26157 - protein, 60 aa, Artificial Sequence
  Synthetic
DEERIIKTLEDINKKLVEDIKRILDKVRELNERLADAIRKILEETKRILERTTRKVRKDG

SEQ ID NO: 26158 - protein, 56 aa, Artificial Sequence
  Synthetic
KDTLRTVEKLVEDVKRRLDKLLEDYKRLIEEVKKELDKLLKEYEDRLREIKKRIDE

SEQ ID NO: 26159 - protein, 59 aa, Artificial Sequence
  Synthetic
DLEDAIRELLRRLTELIEELVRILEELNKRLNDLVRRLVEILRRINELLKKLVDRLRKD

SEQ ID NO: 26160 - protein, 59 aa, Artificial Sequence
  Synthetic
ERELKKVLDDIREKVKKTIKEIDEVLEKITRENERTRKEIEEMLRTLRELIKRLLEETK

SEQ ID NO: 26161 - protein, 56 aa, Artificial Sequence
  Synthetic
SEEDEVAKTLEDILRRLEELLREHHELHRRILEELEKLLRDHIKLHKDILDEATKS

SEQ ID NO: 26162 - protein, 56 aa, Artificial Sequence
  Synthetic
KETLKRLKDRSKELNDRVRETLKRLAERSKRLNEKVEEDVRRAVEELRRLLEEIRK

SEQ ID NO: 26163 - protein, 56 aa, Artificial Sequence
  Synthetic
DERKVIEDLVEVLRDLLRVIKEVLDRNVKLIKDLLRLNLKVAEELIRVLKELLDRL

SEQ ID NO: 26164 - protein, 55 aa, Artificial Sequence
  Synthetic
EELDRIRKELKRLLDELTKLHEDVRKKSEELVREAERTLEDVKRKLDELLERAKK

SEQ ID NO: 26165 - protein, 60 aa, Artificial Sequence
  Synthetic
DEERELERLLEDVRRRHEELLRRLEKLLEDIRKLYEDVRRKLKRLLERVDRLVREILRRD

SEQ ID NO: 26166 - protein, 58 aa, Artificial Sequence
  Synthetic
ELIKELADIVKEILRLAEELAKELEKINRELDRVTRELIKDLLRISRELIKRLEDTTR

SEQ ID NO: 26167 - protein, 58 aa, Artificial Sequence
  Synthetic
SDKELLDDTIRKMRKLHRDSVELLDDIRRKLEELLRKVRELLDRNVKKIRELIELRKK

SEQ ID NO: 26168 - protein, 56 aa, Artificial Sequence
  Synthetic
DSDLEDLIRRDIEELKKVIEKLEELVRRIEELLREAKERDKESLDRIEDELRKAKK

SEQ ID NO: 26169 - protein, 58 aa, Artificial Sequence
  Synthetic
EEDDLLKANLDTLRELHKESEKLLRDIEETAKELHKKSEELLKRITDELDRLVKLSRK

SEQ ID NO: 26170 - protein, 56 aa, Artificial Sequence
  Synthetic
DSDIKRILDDLRRRLEDALRRDRETLKRLKEEIERVKKEDRRSLERDKEELEKARK

SEQ ID NO: 26171 - protein, 56 aa, Artificial Sequence
  Synthetic
SAAELILKAAKEAAEANREAAELALKAAEESARAAREAAELALKAAKEAAEAARRG

SEQ ID NO: 26172 - protein, 56 aa, Artificial Sequence
  Synthetic
KDDLTRAADELLKKAKKLADDYKRAADRLLKEAEDLAREWKKLADKALEDAKRDAD

SEQ ID NO: 26173 - protein, 56 aa, Artificial Sequence
  Synthetic
KAEEAAKEAARLAKEDADLAKKAAEDAAELHERHAKLLEDSARTAAELAKRLAEAA

SEQ ID NO: 26174 - protein, 59 aa, Artificial Sequence
  Synthetic
KEDLDRLAKIAKEAADALEELLERSKESAERAARALEKLLKEWADSAKKAADALEELDR

SEQ ID NO: 26175 - protein, 60 aa, Artificial Sequence
  Synthetic
DELETLKKEAEDVLRELRDILRKLEDLSRKTIEDMRRIVEEVLKLNEDSIRELKRIIEEL

SEQ ID NO: 26176 - protein, 55 aa, Artificial Sequence
  Synthetic
DEVVKKLEDVSRKSIDDLRKIIETLREVVERSIEEIERIIRDLERVIREIIEREK

SEQ ID NO: 26177 - protein, 57 aa, Artificial Sequence
  Synthetic
SKIEELAKIAEEHAELNRRAARKNNEIAKEAAELWKRAAEKHVRIAERAADAIRKAA

SEQ ID NO: 26178 - protein, 59 aa, Artificial Sequence
  Synthetic
EKALREAKELAERAARENREALKEAKELAKRNSEKAKESAKEHKKLAEDANKRAEEATR

SEQ ID NO: 26179 - protein, 59 aa, Artificial Sequence
  Synthetic
DEEEVIEEILKTLEEINRRVLKLIKDILEKVKRVDDEIKTLVKEVLRENERVLREVREK

SEQ ID NO: 26180 - protein, 59 aa, Artificial Sequence
  Synthetic
EKMLEDILRRLEEINRTSLRLVDEVSKKTREVLERILKLVKEVLDESRRVAKKVKDDLK

SEQ ID NO: 26181 - protein, 57 aa, Artificial Sequence
  Synthetic
SAVDIAREAARRVIELLKRSAEAAEEAARRSIKLAKESADAAREAAKKVIEILKRAA

SEQ ID NO: 26182 - protein, 56 aa, Artificial Sequence
  Synthetic
EDAARKAAEIAARAAKRSADTAKRWAEVAKEAAEESAKSAKKAAKIAEDAAREIEK

SEQ ID NO: 26183 - protein, 57 aa, Artificial Sequence
  Synthetic
DLREAAKEAIDAAEEAARRTEEAAKENIRALEEAAKRTRDAVRRAIKAIEDAVRDAG

SEQ ID NO: 26184 - protein, 56 aa, Artificial Sequence
  Synthetic
REDLERIAREAAERAKELADRLEEIYRRAAEESKRLAEELKRIYKRAAEEAKKAAD

SEQ ID NO: 26185 - protein, 57 aa, Artificial Sequence
  Synthetic
SKIEELMKLVEKIIRKTLDLVRKHAEVSKEVLKEYIRISKEHLDVSKRVAEELKKEI

SEQ ID NO: 26186 - protein, 59 aa, Artificial Sequence
  Synthetic
KEDLDRIRDTLRRVIERSKRIHDRLREMLEEVKRRSEEIVERIERELRDVARKLEETLR

SEQ ID NO: 26187 - protein, 59 aa, Artificial Sequence
  Synthetic
SLTEELRRVVKEIEEVVRRDVRTLEEVVKKITEVVRRDDKSLREVVKRNEELVRLLARG

SEQ ID NO: 26188 - protein, 60 aa, Artificial Sequence
  Synthetic
EKDRREILRELVELTERSVEEIARVNKELVDIVRELVKELKRLNERLVELVKRLVEETAT

SEQ ID NO: 26189 - protein, 56 aa, Artificial Sequence
  Synthetic
RAIETLVDVVREAIEINKRLVDRNVESNKELAKLNRDLVRRNRESNTELADLVRRD

SEQ ID NO: 26190 - protein, 60 aa, Artificial Sequence
  Synthetic
EEELKRVVDEIVELLKRVLETTEKVVRDNVRLLEKALRSSKKVLDENVKKLEDVLRDLKR

SEQ ID NO: 26191 - protein, 56 aa, Artificial Sequence
  Synthetic
SAAEALAKLAKENAELNRELAERNARSNKELAELNEEAARRNAKSNKELAELARRE

SEQ ID NO: 26192 - protein, 60 aa, Artificial Sequence
  Synthetic
EEELKRAIEEAAKLLKRAADETRRAAKENAEALEKAARESKEAAKDNAEALKKAAEEAKK

SEQ ID NO: 26193 - protein, 58 aa, Artificial Sequence
  Synthetic
TEEEVVEDVKRVLDESHDDLRRLIETLTRVLRESLKRIKEALEELERVLKKLLDLLEG

SEQ ID NO: 26194 - protein, 56 aa, Artificial Sequence
  Synthetic
REEVKRVLEEARDELRRLLEEYKKIIEELERELERLLREHREVIRRIKEEIDKSSK

SEQ ID NO: 26195 - protein, 59 aa, Artificial Sequence
  Synthetic
SEVERAVEDVKRALEENVRLSKELVDRVTKMAEDNVKLTKDIVDKVRRILEELVEVIER

SEQ ID NO: 26196 - protein, 56 aa, Artificial Sequence
  Synthetic
KDEVRKIVRELVEEAKKVVEYDTENAKRVVEELKRVVKRDADVVRKLVELLDRKAR

SEQ ID NO: 26197 - protein, 59 aa, Artificial Sequence
  Synthetic
SELEEAVKRVRDALRENLDSIRRLVEKIRRVLEEHNKLSKELVDRIEEVLRRTVEAVKK

SEQ ID NO: 26198 - protein, 56 aa, Artificial Sequence
  Synthetic
KRDVARVVRELIELVKRVLERDKRIVDELVKLVDEVLKRNKEIVDELVRLVDEARR

SEQ ID NO: 26199 - protein, 56 aa, Artificial Sequence
  Synthetic
SELEDLIRLLREVIKRLEESVKELVDIVEEAIERLRKIVKELIDLSRKVIDELLEL

SEQ ID NO: 26200 - protein, 59 aa, Artificial Sequence
  Synthetic
EELLDRIRRLIEESIKKLARIADRLRKLIEDLRRLLEELLRRNEELIERLERMLDEKAR

SEQ ID NO: 26201 - protein, 60 aa, Artificial Sequence
  Synthetic
SEKEEAAKAAEEAAEIAERADEKAARSSKEAAKIAEKADKEAAESTRKALDDARRALEEA

SEQ ID NO: 26202 - protein, 59 aa, Artificial Sequence
  Synthetic
EDAARRAEKAARENADSIRRAAEKSRKAAEDNARSIEKAARESEEAAERAARILKRAKD

SEQ ID NO: 26203 - protein, 57 aa, Artificial Sequence
  Synthetic
KEVEDVVEKLRELIDRALDRNRKVVEEVRDVVRRALEENRKVVEEVRKVIKEILDRV

SEQ ID NO: 26204 - protein, 55 aa, Artificial Sequence
  Synthetic
KEATDLIRELIERLRKVLEKSRRLIDRLVKLSRDVLEETKRLVEELIREVKRAET

SEQ ID NO: 26205 - protein, 60 aa, Artificial Sequence
  Synthetic
KLEEIVKKLEDLNKKAVEILRRVLEEHEKLVEKVKKVLRDVLRLLEKVVREVIETLKKKD

SEQ ID NO: 26206 - protein, 56 aa, Artificial Sequence
  Synthetic
EEVLRKLKEIIKELKDRLKKLLDDYERIIDELRRELERVLREYEKILEDLRKELED

SEQ ID NO: 26207 - protein, 60 aa, Artificial Sequence
  Synthetic
SELEEAAKALERIAKKAAKAARDWAEEDRRLAEEAIRAAEEWAKENKKLADELAKAAKDN

SEQ ID NO: 26208 - protein, 56 aa, Artificial Sequence
  Synthetic
SDEAVRALEEAAKRSEDAARKAAKLARDAAEKSRRAAEKAIRLLEEAAKEAKDAAR

SEQ ID NO: 26209 - protein, 57 aa, Artificial Sequence
  Synthetic
KEAEEIAEAVKRLAEASAKTAEELARAVRKAAEDLVKLAKEHADALRTAADRIAKLI

SEQ ID NO: 26210 - protein, 59 aa, Artificial Sequence
  Synthetic
EDIRREIKRIADELKEITKRLEDEVEKIIRRLEKIAKEAEDRHRKLAEELRRIAEEAKR

SEQ ID NO: 26211 - protein, 59 aa, Artificial Sequence
  Synthetic
SVDEALEELVRRLLEVLKTVLERTKELSRDDLRVVKEVLRIIEELVKRLLKVIRDGLDD

SEQ ID NO: 26212 - protein, 59 aa, Artificial Sequence
  Synthetic
EDVRRDIERLLEELKRRVERLLEDIERLLRELEKLNEDVLRENKKLLEDLERRVRERKK

SEQ ID NO: 26213 - protein, 60 aa, Artificial Sequence
  Synthetic
DEERIVREIVKIIEEAVKELVRLVREDIELVKDVVRRHNRLNEEIVKLWKELVDEVLKSR

SEQ ID NO: 26214 - protein, 56 aa, Artificial Sequence
  Synthetic
KDLLRRAEEEIRRLLKENEDILKRVEEEVKKSNEELRRILDRVRRELEKALKRLRD

SEQ ID NO: 26215 - protein, 60 aa, Artificial Sequence
  Synthetic
SKEEEVKRLIDELKRVNERVNKTIKELVKLLEESHEEVLKEIERLIREVLRVIKEVIEAV

SEQ ID NO: 26216 - protein, 59 aa, Artificial Sequence
  Synthetic
KEALDKLVDAARRVLEAVRDVLRKDERSVERVLDEVRRVAEELERTHREVVKRVEDAAR

SEQ ID NO: 26217 - protein, 60 aa, Artificial Sequence
  Synthetic
DKEKTVADLIEKVERSHERVLKRLAELIEELKRVNERVNREIERLIRELEEVIDRVIKAV

SEQ ID NO: 26218 - protein, 59 aa, Artificial Sequence
  Synthetic
REMLEELVRVARRVLEAIKTVADELRKRHEEVSREIERVAEEDKRTVEEVLKRIEDAAR

SEQ ID NO: 26219 - protein, 60 aa, Artificial Sequence
  Synthetic
KDEEIIKRLEDLLKENVDRLREILERVERTHRKVIEELKRILEELEEILRRVIEKLRRKN

SEQ ID NO: 26220 - protein, 55 aa, Artificial Sequence
  Synthetic
RDVERLLKELKRIVEEILRLVRELVTRDIDALRRLLESVRRLVDKLIRIVEERRR

SEQ ID NO: 26221 - protein, 60 aa, Artificial Sequence
  Synthetic
SDKDRLLEEIKRLIDESRRKAEEILKRSTELLEDSKRDLREILRRSEKILDELLDLIRRN

SEQ ID NO: 26222 - protein, 60 aa, Artificial Sequence
  Synthetic
SKEIKDALRRVLEKHKKVLREAIKKHEESLEEHRKVLEEIIELHKRSLKKLEDVIDTVRK

SEQ ID NO: 26223 - protein, 60 aa, Artificial Sequence
  Synthetic
SKEELIKELKETVKRIIKLLEELSKKMEEIIKRIAELLRELSKKLVDIIKRIIELLRREG

SEQ ID NO: 26224 - protein, 55 aa, Artificial Sequence
  Synthetic
EEILKEIKRLLDESKERLDRVLREIEELLRRYEEEVRRVLEEIKKILDELRERIR

SEQ ID NO: 26225 - protein, 56 aa, Artificial Sequence
  Synthetic
DTERAADEARRRLEKLARDHKEKLKKAAEDLRRLLEEAERAHRKIEKELEELTRKV

SEQ ID NO: 26226 - protein, 57 aa, Artificial Sequence
  Synthetic
AERALKEAADRAREALRRNLRALREAVREAEEAIEKDARAIDEALKKAREAIEEAER

SEQ ID NO: 26227 - protein, 56 aa, Artificial Sequence
  Synthetic
SKVEELAERAARSHKELADAIRELAREAAESHKEAAEVVKRLADEAARAAKEVAKA

SEQ ID NO: 26228 - protein, 56 aa, Artificial Sequence
  Synthetic
RKVLEDAKKILEDLRKKAEDALRKHKKILDELEEKAKKAAEKHERILRKLDEDAKR

SEQ ID NO: 26229 - protein, 59 aa, Artificial Sequence
  Synthetic
SEDEEVLKDIKRLLEEVKKTLEEVAKRHEKALREIEERVKEIVKEHEDLLKEVEDKARS

SEQ ID NO: 26230 - protein, 60 aa, Artificial Sequence
  Synthetic
KEDLDRLLKEVLDISRKVLEEVLKIIKRVLEISKRVLEEILRRIEKVLRDIDRVLKKLRE

SEQ ID NO: 26231 - protein, 57 aa, Artificial Sequence
  Synthetic
SREEDLARKIAEAVKELLDADRRLLREIEKLAEELLRINEELLRRLEELARELLEAV

SEQ ID NO: 26232 - protein, 56 aa, Artificial Sequence
  Synthetic
ERLLRKLEEILRRLKDESRKVLKKVKEILDRLKRETEEILDKVRKILERLEEEVRR

SEQ ID NO: 26233 - protein, 59 aa, Artificial Sequence
  Synthetic
SAEEAAEEALRRAAEAAKESIKAAREALEEVRKAAEKSIRAAEKALRDVKKAAEEAKSA

SEQ ID NO: 26234 - protein, 57 aa, Artificial Sequence
  Synthetic
IEEAAKKAIDLARDHARLVKKIAKDLIDLAKEHADLVREIAKRIIEAAKRIAEIVRK

SEQ ID NO: 26235 - protein, 60 aa, Artificial Sequence
  Synthetic
SDEELLEEIKKILDEVLKKNADAVRSLEKVLDKVLEDNARAVEELKTVLDKVLRDLERRG

SEQ ID NO: 26236 - protein, 55 aa, Artificial Sequence
  Synthetic
KDVEEVVKEVRDVLRESVDKVRRVIEEVKRVLDRSSEEVERAVEEVKRVLDKVRK

SEQ ID NO: 26237 - protein, 61 aa, Artificial Sequence
  Synthetic
SDEELLERVERLLRELLDTNRRMLEEVEKELRRLLETNKKTLDDVRRLLKELLDVLETRGV

SEQ ID NO: 26238 - protein, 55 aa, Artificial Sequence
  Synthetic
DDLRELKKRIEDLLKEDKERLEKIARDIERDLERYARDLKRLEDELREDIERARR

SEQ ID NO: 26239 - protein, 61 aa, Artificial Sequence; identical to SEQ ID NO: 26237
  Synthetic

SEQ ID NO: 26240 - protein, 55 aa, Artificial Sequence; identical to SEQ ID NO: 26238
  Synthetic

SEQ ID NO: 26241 - protein, 56 aa, Artificial Sequence
  Synthetic
EEDERLTKRVEEIKRENRELLRRLEEEVKELERKSEKIVRDLKEKVDRAKEKLDSG

SEQ ID NO: 26242 - protein, 57 aa, Artificial Sequence; identical to SEQ ID NO: 25298
  Synthetic

SEQ ID NO: 26243 - protein, 56 aa, Artificial Sequence; identical to SEQ ID NO: 26241
  Synthetic

SEQ ID NO: 26244 - protein, 57 aa, Artificial Sequence; identical to SEQ ID NO: 25298
  Synthetic

SEQ ID NO: 26245 - protein, 58 aa, Artificial Sequence
  Synthetic
TEEEVLRKVEKLIKDLLDVLRDLLRASEEVVREALRVLEELIEENKRVIEELSRALSG

SEQ ID NO: 26246 - protein, 60 aa, Artificial Sequence
  Synthetic
EEKLRRDLTETKKELEKRHEDLRRELEKLLRDYKRELEEIERALEEIEKTLKRRADETRR

SEQ ID NO: 26247 - protein, 58 aa, Artificial Sequence; identical to SEQ ID NO: 26245
  Synthetic

SEQ ID NO: 26248 - protein, 60 aa, Artificial Sequence; identical to SEQ ID NO: 26246
  Synthetic

SEQ ID NO: 26249 - protein, 60 aa, Artificial Sequence
  Synthetic
SAKETIRKLIEENKDIIRKLAEKLKRLLEESERIAEEALRLIKELLERIERALRRVGSGI

SEQ ID NO: 26250 - protein, 55 aa, Artificial Sequence
  Synthetic
KELEKLLEDLEREIRRLAKRLKELSDRLEEKIRKIKRELDDLSARLREKIERTRK

SEQ ID NO: 26251 - protein, 60 aa, Artificial Sequence; identical to SEQ ID NO: 26249
  Synthetic

SEQ ID NO: 26252 - protein, 55 aa, Artificial Sequence; identical to SEQ ID NO: 26250
  Synthetic

SEQ ID NO: 26253 - protein, 59 aa, Artificial Sequence; identical to SEQ ID NO: 25341
  Synthetic

SEQ ID NO: 26254 - protein, 56 aa, Artificial Sequence; identical to SEQ ID NO: 25342
  Synthetic

SEQ ID NO: 26255 - protein, 59 aa, Artificial Sequence; identical to SEQ ID NO: 25341
  Synthetic

SEQ ID NO: 26256 - protein, 56 aa, Artificial Sequence; identical to SEQ ID NO: 25342
  Synthetic

SEQ ID NO: 26257 - protein, 60 aa, Artificial Sequence; identical to SEQ ID NO: 25343
  Synthetic

SEQ ID NO: 26258 - protein, 58 aa, Artificial Sequence
  Synthetic
EEIKRLKEELERRHRRLEEEVERVARELEKAHRDLERDIRRVAEELKKLLKKLRDDRR

SEQ ID NO: 26259 - protein, 60 aa, Artificial Sequence; identical to SEQ ID NO: 25343
  Synthetic

SEQ ID NO: 26260 - protein, 58 aa, Artificial Sequence; identical to SEQ ID NO: 26258
  Synthetic

SEQ ID NO: 26261 - protein, 60 aa, Artificial Sequence
  Synthetic
SAEETVERLLEEARKRHEEIIKKAKELLDRAREEHERIIREAEKLLEEIKKRVDELVRDG

SEQ ID NO: 26262 - protein, 56 aa, Artificial Sequence; identical to SEQ ID NO: 25348
  Synthetic

SEQ ID NO: 26263 - protein, 60 aa, Artificial Sequence; identical to SEQ ID NO: 26261
  Synthetic

SEQ ID NO: 26264 - protein, 56 aa, Artificial Sequence; identical to SEQ ID NO: 25348
  Synthetic

SEQ ID NO: 26265 - protein, 56 aa, Artificial Sequence
  Synthetic
SEKEELKRLLDKLLKELKRLSDELKATIDKILKILKEVSEEVKRTADELLDAIRRG

SEQ ID NO: 26266 - protein, 59 aa, Artificial Sequence
  Synthetic
EDELRKVEEDLKRLEDKLKKLLEDYEKKVRELEETLDDLLRKYEETLRRLEKELEEAER

SEQ ID NO: 26267 - protein, 56 aa, Artificial Sequence; identical to SEQ ID NO: 26265
  Synthetic

SEQ ID NO: 26268 - protein, 59 aa, Artificial Sequence; identical to SEQ ID NO: 26266
  Synthetic

SEQ ID NO: 26269 - protein, 60 aa, Artificial Sequence
  Synthetic
SDAERLVKKIADSLRAYEDLLRKLVERIRDLLRAYEEELRKLLTEIEKTLEDVRDVLRRG

SEQ ID NO: 26270 - protein, 58 aa, Artificial Sequence
  Synthetic
DLLEALRRLVERLKRLIERVLKLNRELVKKLLELLEEALRANRRLVEDILKIADEARK

SEQ ID NO: 26271 - protein, 60 aa, Artificial Sequence; identical to SEQ ID NO: 26269
  Synthetic

SEQ ID NO: 26272 - protein, 58 aa, Artificial Sequence; identical to SEQ ID NO: 26270
  Synthetic

SEQ ID NO: 26273 - protein, 59 aa, Artificial Sequence
  Synthetic
SATERVLDLARDLIRILLEIHKRALKLIAELVSKLLKIHEDVLKLSEELVEELLEIVKR

SEQ ID NO: 26274 - protein, 60 aa, Artificial Sequence
  Synthetic
EDTLRRVLERIREEVERVKEKHRRLLEELKKLLEELRARSADLLEDIKRKVRELEEKTRR

SEQ ID NO: 26275 - protein, 59 aa, Artificial Sequence; identical to SEQ ID NO: 26273
  Synthetic

SEQ ID NO: 26276 - protein, 60 aa, Artificial Sequence; identical to SEQ ID NO: 26274
  Synthetic

SEQ ID NO: 26277 - protein, 56 aa, Artificial Sequence; identical to SEQ ID NO: 25371
  Synthetic

SEQ ID NO: 26278 - protein, 60 aa, Artificial Sequence
  Synthetic
RERLARLLKALADKLIRVLEEILKINEELNRKIIKFARENLERNRRVNKKVIEVLREAAR

SEQ ID NO: 26279 - protein, 56 aa, Artificial Sequence; identical to SEQ ID NO: 25371
  Synthetic

SEQ ID NO: 26280 - protein, 60 aa, Artificial Sequence; identical to SEQ ID NO: 26278
  Synthetic

SEQ ID NO: 26281 - protein, 61 aa, Artificial Sequence
  Synthetic
STEEILKRVKEILDELAKELRDIIRESLRTIEELLDELRRILEESERTLEELVKTIKDGVK

SEQ ID NO: 26282 - protein, 59 aa, Artificial Sequence; identical to SEQ ID NO: 25380
  Synthetic

SEQ ID NO: 26283 - protein, 61 aa, Artificial Sequence; identical to SEQ ID NO: 26281
  Synthetic

SEQ ID NO: 26284 - protein, 59 aa, Artificial Sequence; identical to SEQ ID NO: 25380
  Synthetic

SEQ ID NO: 26285 - protein, 60 aa, Artificial Sequence
  Synthetic
SEKEELLKLIKRVIELLKRVLEEHLRLVEDVIRRLKELLDSNEKIVREVIEDLKRLLDEV

SEQ ID NO: 26286 - protein, 59 aa, Artificial Sequence
  Synthetic
EDLLRKAKKVITEVREKLKRNLEDVRRVIEDVKRKSARILEEARRLIEEVERELEKIRK

SEQ ID NO: 26287 - protein, 60 aa, Artificial Sequence; identical to SEQ ID NO: 26285
  Synthetic

SEQ ID NO: 26288 - protein, 59 aa, Artificial Sequence; identical to SEQ ID NO: 26286
  Synthetic

SEQ ID NO: 26289 - protein, 57 aa, Artificial Sequence
  Synthetic
SRAERIKRALEEHIRKLKEITDEVRKTNEELLELTRRILEEAKKANEELVKKIREAG

SEQ ID NO: 26290 - protein, 56 aa, Artificial Sequence; identical to SEQ ID NO: 25390
  Synthetic

SEQ ID NO: 26291 - protein, 57 aa, Artificial Sequence; identical to SEQ ID NO: 26289
  Synthetic

SEQ ID NO: 26292 - protein, 56 aa, Artificial Sequence; identical to SEQ ID NO: 25390
  Synthetic

SEQ ID NO: 26293 - protein, 57 aa, Artificial Sequence
  Synthetic
SEAEKIREALETNLRLLEELIKRLKEILDTHNELLRRVIETLERLLKELLELLEEGG

SEQ ID NO: 26294 - protein, 56 aa, Artificial Sequence
  Synthetic
KEDLERLRRKVEELEDRLRRLLEKLARDSAELMRELERILDRYARESEELDRRLAE

SEQ ID NO: 26295 - protein, 57 aa, Artificial Sequence; identical to SEQ ID NO: 26293
  Synthetic

SEQ ID NO: 26296 - protein, 56 aa, Artificial Sequence; identical to SEQ ID NO: 26294
  Synthetic

SEQ ID NO: 26297 - protein, 62 aa, Artificial Sequence
  Synthetic
SAEEELEKLVRKVEEDLKRLEEESERIKKEIKDTLRAIRKRSEDLKRKVKELLRRLEEEGRR

SEQ ID NO: 26298 - protein, 60 aa, Artificial Sequence
  Synthetic
ADEALEMLKRLLDKALKVHEDVLRKLVELVDEVLKVHEESLRKLLTLAAKVLEVLRKITK

SEQ ID NO: 26299 - protein, 62 aa, Artificial Sequence; identical to SEQ ID NO: 26297
  Synthetic

SEQ ID NO: 26300 - protein, 60 aa, Artificial Sequence; identical to SEQ ID NO: 26298
  Synthetic

SEQ ID NO: 26301 - protein, 60 aa, Artificial Sequence
  Synthetic
DDERRKLEDLERMVEELKRKSDKLLKEIREEVERLERETRKLLEELKAKVDELREDLRRN

SEQ ID NO: 26302 - protein, 55 aa, Artificial Sequence
  Synthetic
EDLEKAERLVKDILRLNEEHTAELEDVVRDLLRALEKHTRDLEKLVKDALDKVKT

SEQ ID NO: 26303 - protein, 60 aa, Artificial Sequence; identical to SEQ ID NO: 26301
  Synthetic

SEQ ID NO: 26304 - protein, 55 aa, Artificial Sequence; identical to SEQ ID NO: 26302
  Synthetic

SEQ ID NO: 26305 - protein, 62 aa, Artificial Sequence
  Synthetic
SKIDEALKKLAKILEDAIKLNKELNDTTAEILKEIIKLNAEVLEKIRRILKELVDLILKGLK

SEQ ID NO: 26306 - protein, 55 aa, Artificial Sequence; identical to SEQ ID NO: 25416
  Synthetic

SEQ ID NO: 26307 - protein, 62 aa, Artificial Sequence; identical to SEQ ID NO: 26305
  Synthetic

SEQ ID NO: 26308 - protein, 55 aa, Artificial Sequence; identical to SEQ ID NO: 25416
  Synthetic

SEQ ID NO: 26309 - protein, 59 aa, Artificial Sequence; identical to SEQ ID NO: 25421
  Synthetic

SEQ ID NO: 26310 - protein, 60 aa, Artificial Sequence
  Synthetic
KETLARDLKEALKTLIKLIREILEDNLRVLRRIIELIETLLEDNRRVLEEIIKLIEEATT

SEQ ID NO: 26311 - protein, 60 aa, Artificial Sequence
  Synthetic
DEEEKIREDLERTLREYERELRRAKEELKETLKRYEEELREVKEDLDRTLEEVDDLLRRG

SEQ ID NO: 26312 - protein, 60 aa, Artificial Sequence; identical to SEQ ID NO: 26310
  Synthetic

SEQ ID NO: 26313 - protein, 58 aa, Artificial Sequence
  Synthetic
DELEKVERLLEEIEKIIEDLIRRVEELVRRILEFNKTTLKRNEELVRELEKLVKETTG

SEQ ID NO: 26314 - protein, 59 aa, Artificial Sequence; identical to SEQ ID NO: 25426
  Synthetic

SEQ ID NO: 26315 - protein, 58 aa, Artificial Sequence; identical to SEQ ID NO: 26313
  Synthetic

SEQ ID NO: 26316 - protein, 59 aa, Artificial Sequence; identical to SEQ ID NO: 25426
  Synthetic

SEQ ID NO: 26317 - protein, 56 aa, Artificial Sequence
  Synthetic
SEKERLMRLLDKLKDLNRRLVERIKELLDKALELHKKLVKELRELLERLKELVERG

SEQ ID NO: 26318 - protein, 59 aa, Artificial Sequence
  Synthetic
EETVRRLREALKKLEDDLRKIERDAEREYKKLKDELEELTERYRREIRKLKEELKADRK

SEQ ID NO: 26319 - protein, 56 aa, Artificial Sequence; identical to SEQ ID NO: 26317
  Synthetic

SEQ ID NO: 26320 - protein, 59 aa, Artificial Sequence; identical to SEQ ID NO: 26318
  Synthetic

SEQ ID NO: 26321 - protein, 56 aa, Artificial Sequence
  Synthetic
SEAEDLEELIKELAELLKDVIRKLEKINRRLVKILEDIIRRLKEISKEAEEELRKG

SEQ ID NO: 26322 - protein, 59 aa, Artificial Sequence; identical to SEQ ID NO: 25434
  Synthetic

SEQ ID NO: 26323 - protein, 56 aa, Artificial Sequence; identical to SEQ ID NO: 26321
  Synthetic

SEQ ID NO: 26324 - protein, 59 aa, Artificial Sequence; identical to SEQ ID NO: 25434
  Synthetic

SEQ ID NO: 26325 - protein, 60 aa, Artificial Sequence; identical to SEQ ID NO: 25439
  Synthetic

SEQ ID NO: 26326 - protein, 60 aa, Artificial Sequence; identical to SEQ ID NO: 25440
  Synthetic

SEQ ID NO: 26327 - protein, 60 aa, Artificial Sequence; identical to SEQ ID NO: 25439
  Synthetic

SEQ ID NO: 26328 - protein, 60 aa, Artificial Sequence; identical to SEQ ID NO: 25440
  Synthetic

SEQ ID NO: 26329 - protein, 60 aa, Artificial Sequence; identical to SEQ ID NO: 25441
  Synthetic

SEQ ID NO: 26330 - protein, 59 aa, Artificial Sequence; identical to SEQ ID NO: 25442
  Synthetic

SEQ ID NO: 26331 - protein, 60 aa, Artificial Sequence; identical to SEQ ID NO: 25441
  Synthetic

SEQ ID NO: 26332 - protein, 59 aa, Artificial Sequence; identical to SEQ ID NO: 25442
  Synthetic

SEQ ID NO: 26333 - protein, 60 aa, Artificial Sequence
  Synthetic
DEDRIIEEIARLLEELLRELLELIKKLIETNRRLNEEHERAVRELARLLEELLDRLVKKG

SEQ ID NO: 26334 - protein, 59 aa, Artificial Sequence
  Synthetic
EKIAEEIERELEELRRMIKRLHEDLERKLKESEDELREIEARLEEKIRRLEEKLERKRR

SEQ ID NO: 26335 - protein, 60 aa, Artificial Sequence; identical to SEQ ID NO: 26333
  Synthetic

SEQ ID NO: 26336 - protein, 59 aa, Artificial Sequence; identical to SEQ ID NO: 26334
  Synthetic

SEQ ID NO: 26337 - protein, 59 aa, Artificial Sequence
  Synthetic
DEEEKIRTTLDLLRKLLKVLREILEELIRSNKELNERLLRLVEDSDRLLEELLKKLADD

SEQ ID NO: 26338 - protein, 59 aa, Artificial Sequence
  Synthetic
EEKVRDTEKKLRDLREKHAEIAKELERLLRENRRRLEELAREAKKVLDELRKRLEDERR

SEQ ID NO: 26339 - protein, 59 aa, Artificial Sequence; identical to SEQ ID NO: 26337
  Synthetic

SEQ ID NO: 26340 - protein, 59 aa, Artificial Sequence; identical to SEQ ID NO: 26338
  Synthetic

SEQ ID NO: 26341 - protein, 59 aa, Artificial Sequence
  Synthetic
SEKEKLLKESEEEVRRLRRTLEELLRKYREVLERLRKELREIEERVRDVVRRLKEVLDR

SEQ ID NO: 26342 - protein, 56 aa, Artificial Sequence
  Synthetic
ERLVKTLIEDVEAVIKRILELITRVAEDNERVLERIIRELTDNLERHLKIVREIVK

SEQ ID NO: 26343 - protein, 59 aa, Artificial Sequence; identical to SEQ ID NO: 26341
  Synthetic

SEQ ID NO: 26344 - protein, 56 aa, Artificial Sequence; identical to SEQ ID NO: 26342
  Synthetic

SEQ ID NO: 26345 - protein, 60 aa, Artificial Sequence
  Synthetic
SELERAEELIKKLLKLHEDVLRRLTEVDDELLEIHDRVLKRLKEVDDELLKLIRDMLRRG

SEQ ID NO: 26346 - protein, 58 aa, Artificial Sequence; identical to SEQ ID NO: 25488
  Synthetic

SEQ ID NO: 26347 - protein, 60 aa, Artificial Sequence; identical to SEQ ID NO: 26345
  Synthetic

SEQ ID NO: 26348 - protein, 58 aa, Artificial Sequence; identical to SEQ ID NO: 25488
  Synthetic

SEQ ID NO: 26349 - protein, 59 aa, Artificial Sequence; identical to SEQ ID NO: 25495
  Synthetic

SEQ ID NO: 26350 - protein, 55 aa, Artificial Sequence
  Synthetic
REIEKEIRRILEELKAKHDEIEKKIRELEREIKRAHEELEDRIRKIERDLDRRTK

SEQ ID NO: 26351 - protein, 59 aa, Artificial Sequence; identical to SEQ ID NO: 25495
  Synthetic

SEQ ID NO: 26352 - protein, 55 aa, Artificial Sequence; identical to SEQ ID NO: 26350
  Synthetic

SEQ ID NO: 26353 - protein, 60 aa, Artificial Sequence
  Synthetic
SSEELLKRIVDEDERVLEEWARVLEEIKDLSKAVVDLLDKVLKEIEAIVDEVTRRLERDG

SEQ ID NO: 26354 - protein, 55 aa, Artificial Sequence
  Synthetic
KDLLETIKKRVEEIRRTLEKIKRDYDKAIEEIRAKLERKLEEYKEVIDDLRRKTK

SEQ ID NO: 26355 - protein, 60 aa, Artificial Sequence; identical to SEQ ID NO: 26353
  Synthetic

SEQ ID NO: 26356 - protein, 55 aa, Artificial Sequence; identical to SEQ ID NO: 26354
  Synthetic

SEQ ID NO: 26357 - protein, 59 aa, Artificial Sequence; identical to SEQ ID NO: 25517
  Synthetic

SEQ ID NO: 26358 - protein, 56 aa, Artificial Sequence; identical to SEQ ID NO: 25518
  Synthetic

SEQ ID NO: 26359 - protein, 59 aa, Artificial Sequence; identical to SEQ ID NO: 25517
  Synthetic

SEQ ID NO: 26360 - protein, 56 aa, Artificial Sequence; identical to SEQ ID NO: 25518
  Synthetic

SEQ ID NO: 26361 - protein, 56 aa, Artificial Sequence
  Synthetic
DKAEVLREALKLLKDLLEELIKIHEESLKRILDLIDTLVKVHEDALRALKELLERS

SEQ ID NO: 26362 - protein, 55 aa, Artificial Sequence; identical to SEQ ID NO: 25524
  Synthetic

SEQ ID NO: 26363 - protein, 56 aa, Artificial Sequence; identical to SEQ ID NO: 26361
  Synthetic

SEQ ID NO: 26364 - protein, 55 aa, Artificial Sequence; identical to SEQ ID NO: 25524
  Synthetic

SEQ ID NO: 26365 - protein, 56 aa, Artificial Sequence
  Synthetic
STREKAKKVLDTLRADNEDMKRVVEKILRALKRTNERAEKLAREITEEIKRILKEV

SEQ ID NO: 26366 - protein, 56 aa, Artificial Sequence; identical to SEQ ID NO: 25528
  Synthetic

SEQ ID NO: 26367 - protein, 56 aa, Artificial Sequence; identical to SEQ ID NO: 26365
  Synthetic

SEQ ID NO: 26368 - protein, 56 aa, Artificial Sequence; identical to SEQ ID NO: 25528
  Synthetic

SEQ ID NO: 26369 - protein, 56 aa, Artificial Sequence
  Synthetic
SKAEKLLKDLREALEKVKRRYEELERRLDEVLKEHEEIVKRLLEELEKVLKRIEEG

SEQ ID NO: 26370 - protein, 59 aa, Artificial Sequence; identical to SEQ ID NO: 25542
  Synthetic

SEQ ID NO: 26371 - protein, 56 aa, Artificial Sequence; identical to SEQ ID NO: 26369
  Synthetic

SEQ ID NO: 26372 - protein, 59 aa, Artificial Sequence; identical to SEQ ID NO: 25542
  Synthetic

SEQ ID NO: 26373 - protein, 57 aa, Artificial Sequence; identical to SEQ ID NO: 25543
  Synthetic

SEQ ID NO: 26374 - protein, 59 aa, Artificial Sequence
  Synthetic
EDLLTELEKKLRKLKRDSEKVVDDLKKELERIKREVKRLIEENARTLADIKRAVDEARK

SEQ ID NO: 26375 - protein, 57 aa, Artificial Sequence; identical to SEQ ID NO: 25543
  Synthetic

SEQ ID NO: 26376 - protein, 59 aa, Artificial Sequence; identical to SEQ ID NO: 26374
  Synthetic

SEQ ID NO: 26377 - protein, 56 aa, Artificial Sequence; identical to SEQ ID NO: 25551
  Synthetic

SEQ ID NO: 26378 - protein, 59 aa, Artificial Sequence
  Synthetic
DDERRTLTELLKRMEDILEKVERTLKKLLDDSARMAEEVKKTLKELLERSEKVAEDVRK

SEQ ID NO: 26379 - protein, 56 aa, Artificial Sequence; identical to SEQ ID NO: 25551
  Synthetic

SEQ ID NO: 26380 - protein, 59 aa, Artificial Sequence; identical to SEQ ID NO: 26378
  Synthetic

SEQ ID NO: 26381 - protein, 56 aa, Artificial Sequence; identical to SEQ ID NO: 25555
  Synthetic

SEQ ID NO: 26382 - protein, 59 aa, Artificial Sequence; identical to SEQ ID NO: 25556
  Synthetic

SEQ ID NO: 26383 - protein, 56 aa, Artificial Sequence; identical to SEQ ID NO: 25555
  Synthetic

SEQ ID NO: 26384 - protein, 59 aa, Artificial Sequence; identical to SEQ ID NO: 25556
  Synthetic

SEQ ID NO: 26385 - protein, 60 aa, Artificial Sequence
  Synthetic
SKKELLEEVVRRAIELLKRHLEKLKRILEEIVRLLEEHLEKVERVLEAILSLLDDLLRRG

SEQ ID NO: 26386 - protein, 56 aa, Artificial Sequence
  Synthetic
EDKLKEIEDELRRLLEELRRLDKAIKDRLRELKKDLDEANRRIKETLKKLLREVEK

SEQ ID NO: 26387 - protein, 60 aa, Artificial Sequence; identical to SEQ ID NO: 26385
  Synthetic

SEQ ID NO: 26388 - protein, 56 aa, Artificial Sequence; identical to SEQ ID NO: 26386
  Synthetic

SEQ ID NO: 26389 - protein, 56 aa, Artificial Sequence
  Synthetic
SDLEELEALIRRLLKINEDLIRIIEDLIRKSLTLLKRIVDLIRELIREIEEIIRRT

SEQ ID NO: 26390 - protein, 55 aa, Artificial Sequence; identical to SEQ ID NO: 25580
  Synthetic

SEQ ID NO: 26391 - protein, 56 aa, Artificial Sequence; identical to SEQ ID NO: 26389
  Synthetic

SEQ ID NO: 26392 - protein, 55 aa, Artificial Sequence; identical to SEQ ID NO: 25580
  Synthetic

SEQ ID NO: 26393 - protein, 60 aa, Artificial Sequence
  Synthetic
SERDVLRELLERIKKLLETLIRIVEELVRRSEETIKRLAELNRRLIEEIRRIVEEVKKGV

SEQ ID NO: 26394 - protein, 55 aa, Artificial Sequence; identical to SEQ ID NO: 25606
  Synthetic

SEQ ID NO: 26395 - protein, 60 aa, Artificial Sequence; identical to SEQ ID NO: 26393
  Synthetic

SEQ ID NO: 26396 - protein, 55 aa, Artificial Sequence; identical to SEQ ID NO: 25606
  Synthetic

SEQ ID NO: 26397 - protein, 58 aa, Artificial Sequence
  Synthetic
SKEELVKEIDELNKRVNDLLEELLRKSEKLHKEILELLERLLREIISLLRRILEIVER

SEQ ID NO: 26398 - protein, 56 aa, Artificial Sequence
  Synthetic
EDELRRLLEDIERKIEALLRELKKESEEIRKRIRELLEDNRDKSRKIKKAIEELKK

SEQ ID NO: 26399 - protein, 58 aa, Artificial Sequence; identical to SEQ ID NO: 26397
  Synthetic

SEQ ID NO: 26400 - protein, 56 aa, Artificial Sequence; identical to SEQ ID NO: 26398
  Synthetic

SEQ ID NO: 26401 - protein, 60 aa, Artificial Sequence
  Synthetic
KEIEETLKELEDLNREMVETNRRVLEETRRLNKETVDRVKATLDELAKMLKKLVDDVRKG

SEQ ID NO: 26402 - protein, 55 aa, Artificial Sequence
  Synthetic
KAVEELEKALEEIKRRLKEVIDRYEDELRKLRKEYKEKIDKYERKLEEIERRERT

SEQ ID NO: 26403 - protein, 60 aa, Artificial Sequence; identical to SEQ ID NO: 26401
  Synthetic

SEQ ID NO: 26404 - protein, 55 aa, Artificial Sequence; identical to SEQ ID NO: 26402
  Synthetic

SEQ ID NO: 26405 - protein, 56 aa, Artificial Sequence; identical to SEQ ID NO: 25691
  Synthetic

SEQ ID NO: 26406 - protein, 56 aa, Artificial Sequence
  Synthetic
EDVVRALIEVIERLLRVAEEVIRRILKVNTELMRVDERSIRESLKAISEVLKVLDT

SEQ ID NO: 26407 - protein, 56 aa, Artificial Sequence; identical to SEQ ID NO: 25691
  Synthetic

SEQ ID NO: 26408 - protein, 56 aa, Artificial Sequence; identical to SEQ ID NO: 26406
  Synthetic

SEQ ID NO: 26409 - protein, 60 aa, Artificial Sequence
  Synthetic
DEDELIRKLLEDLKDIVRKILELIERDLRDIERVVRRIVKVIRDDLKKIKEVVDDIARGV

SEQ ID NO: 26410 - protein, 59 aa, Artificial Sequence
  Synthetic
SELADRIRKLIEDLERHTAKVLEDVKRAITELRKNSKDILEEVRKLIDELRKRIKEVED

SEQ ID NO: 26411 - protein, 60 aa, Artificial Sequence; identical to SEQ ID NO: 26409
  Synthetic

SEQ ID NO: 26412 - protein, 59 aa, Artificial Sequence; identical to SEQ ID NO: 26410
  Synthetic

SEQ ID NO: 26413 - protein, 59 aa, Artificial Sequence
  Synthetic
RDRDVLRKVKAEIEELVARIEKVSRDALSEVKRLLDENRKIAEDVLRLIESLLRKIRDT

SEQ ID NO: 26414 - protein, 59 aa, Artificial Sequence
  Synthetic
EEVVEELLRMLKRVAEEMKRVHDDLSRAVEKVVRDVVRVDKELLDELARILRRLEEVIT

SEQ ID NO: 26415 - protein, 59 aa, Artificial Sequence; identical to SEQ ID NO: 26413
  Synthetic

SEQ ID NO: 26416 - protein, 59 aa, Artificial Sequence; identical to SEQ ID NO: 26414
  Synthetic

SEQ ID NO: 26417 - protein, 56 aa, Artificial Sequence
  Synthetic
SKDEELARLLEELVERWRKIVEDLERDHRRLVKEIRELVERIRKKLEELVDRIRKN

SEQ ID NO: 26418 - protein, 58 aa, Artificial Sequence
  Synthetic
EEIRRILEELKRIVDDVLRIIARILKLLRDLTRRLAEVAKAVHKLLEELLRKLKEDTR

SEQ ID NO: 26419 - protein, 56 aa, Artificial Sequence; identical to SEQ ID NO: 26417
  Synthetic

SEQ ID NO: 26420 - protein, 58 aa, Artificial Sequence; identical to SEQ ID NO: 26418
  Synthetic

SEQ ID NO: 26421 - protein, 56 aa, Artificial Sequence
  Synthetic
SAAETVKRLAEESSERIRKIVEDDKRVADDSSRKIKELIEEIKRRVKELLDRIKGL

SEQ ID NO: 26422 - protein, 56 aa, Artificial Sequence
  Synthetic
KEAVIRLIEELVKLLEDVLRRLLEVNETLVELNKRVWDRLVRINEELAEVALRVAT

SEQ ID NO: 26423 - protein, 56 aa, Artificial Sequence; identical to SEQ ID NO: 26421
  Synthetic

SEQ ID NO: 26424 - protein, 56 aa, Artificial Sequence; identical to SEQ ID NO: 26422
  Synthetic

SEQ ID NO: 26425 - protein, 56 aa, Artificial Sequence
  Synthetic
SALETVKKLLEDSSEKIERIVEEDERVAKESSDRIRRLVEEDKRVADEILDLIEKI

SEQ ID NO: 26426 - protein, 56 aa, Artificial Sequence
  Synthetic
AEAVIKVIEKLIRANKRVWDALLKINEDLVRVNKTVWKELLRVNEKLARDLERVVK

SEQ ID NO: 26427 - protein, 56 aa, Artificial Sequence; identical to SEQ ID NO: 26425
  Synthetic

SEQ ID NO: 26428 - protein, 56 aa, Artificial Sequence; identical to SEQ ID NO: 26426
  Synthetic

SEQ ID NO: 26429 - protein, 60 aa, Artificial Sequence
  Synthetic
DEIETVLKRLAELIKESLDLLRETLDELRKIIEESKKSLEDVLRRLKELIDRLRRLAKEG

SEQ ID NO: 26430 - protein, 60 aa, Artificial Sequence
  Synthetic
ADELLRRVEEILKRLLELIRRIIEEHRKILERLLETHEDLIRKHEEILRRLLKAADEERQ

SEQ ID NO: 26431 - protein, 60 aa, Artificial Sequence; identical to SEQ ID NO: 26429
  Synthetic

SEQ ID NO: 26432 - protein, 60 aa, Artificial Sequence; identical to SEQ ID NO: 26430
  Synthetic

SEQ ID NO: 26433 - protein, 57 aa, Artificial Sequence
  Synthetic
SKEEKLKDDVRAVLEDLDRVLKELEKLSEDNLRELKRVLDRITDLHRRILDELRKGI

SEQ ID NO: 26434 - protein, 59 aa, Artificial Sequence
  Synthetic
SKAAEDILRVLEKLVKVSREAIKLILELSEHHVRVSTRIARLLLDVARKLAEVIKEAER

SEQ ID NO: 26435 - protein, 57 aa, Artificial Sequence; identical to SEQ ID NO: 26433
  Synthetic

SEQ ID NO: 26436 - protein, 59 aa, Artificial Sequence; identical to SEQ ID NO: 26434
  Synthetic

SEQ ID NO: 26437 - protein, 61 aa, Artificial Sequence
  Synthetic
SEIEDVIRRLRKILEDLERVSEKLLREIKKILDEARRLNEEVIKEIKRVLEDAVRVFRDGS

SEQ ID NO: 26438 - protein, 56 aa, Artificial Sequence; identical to SEQ ID NO: 25780
  Synthetic

SEQ ID NO: 26439 - protein, 60 aa, Artificial Sequence
  Synthetic
SEIEDVIRRLRKILEDLERVSEKLLREIKKILDEARRLNEEVIKEIKRVLEDAVRVFRDG

SEQ ID NO: 26440 - protein, 56 aa, Artificial Sequence; identical to SEQ ID NO: 25780
  Synthetic

SEQ ID NO: 26441 - protein, 60 aa, Artificial Sequence
  Synthetic
SREEIVATLEDLARKILEVVKKLAKEIEDAWREIERAVREILKRLEELWREIEDVVRKKV

SEQ ID NO: 26442 - protein, 59 aa, Artificial Sequence
  Synthetic
EEAVKELVELLEEILERNTRVIKEIIDLLRTVIRIHEKIVEDLIKLLEELLRRLEEATR

SEQ ID NO: 26443 - protein, 60 aa, Artificial Sequence; identical to SEQ ID NO: 26441
  Synthetic

SEQ ID NO: 26444 - protein, 59 aa, Artificial Sequence; identical to SEQ ID NO: 26442
  Synthetic

SEQ ID NO: 26445 - protein, 58 aa, Artificial Sequence; identical to SEQ ID NO: 25783
  Synthetic

SEQ ID NO: 26446 - protein, 59 aa, Artificial Sequence; identical to SEQ ID NO: 25784
  Synthetic

SEQ ID NO: 26447 - protein, 58 aa, Artificial Sequence; identical to SEQ ID NO: 25783
  Synthetic

SEQ ID NO: 26448 - protein, 59 aa, Artificial Sequence; identical to SEQ ID NO: 25784
  Synthetic

SEQ ID NO: 26449 - protein, 55 aa, Artificial Sequence
  Synthetic
SKEERLREVAEKHKKDLEDIVKRVDEAAKETARRLEEILKRLEEVLKKILDDLEK

SEQ ID NO: 26450 - protein, 55 aa, Artificial Sequence; identical to SEQ ID NO: 25794
  Synthetic

SEQ ID NO: 26451 - protein, 55 aa, Artificial Sequence; identical to SEQ ID NO: 26449
  Synthetic

SEQ ID NO: 26452 - protein, 55 aa, Artificial Sequence; identical to SEQ ID NO: 25794
  Synthetic

SEQ ID NO: 26453 - protein, 56 aa, Artificial Sequence; identical to SEQ ID NO: 25819
  Synthetic

SEQ ID NO: 26454 - protein, 62 aa, Artificial Sequence
  Synthetic
EDAVRKIAKIIEELKRLLEDLARDTRRVIEEAKRLLKEWRDRNKEVADTLKKLLEDLIRKIR

SEQ ID NO: 26455 - protein, 56 aa, Artificial Sequence; identical to SEQ ID NO: 25819
  Synthetic

SEQ ID NO: 26456 - protein, 62 aa, Artificial Sequence; identical to SEQ ID NO: 26454
  Synthetic

SEQ ID NO: 26457 - protein, 61 aa, Artificial Sequence
  Synthetic
SEDELLEKIVRKLAEAVKRIEEELRKSKREIERLVKEIKEKLEDSLARVKETLDRIRETRK

SEQ ID NO: 26458 - protein, 56 aa, Artificial Sequence
  Synthetic
LEELLRLLKEVIERSIESLERLLELILRVLEYSVASLEELLRRLLEVIKRIVDTTK

SEQ ID NO: 26459 - protein, 61 aa, Artificial Sequence; identical to SEQ ID NO: 26457
  Synthetic

SEQ ID NO: 26460 - protein, 56 aa, Artificial Sequence; identical to SEQ ID NO: 26458
  Synthetic

SEQ ID NO: 26461 - protein, 59 aa, Artificial Sequence
  Synthetic
DEDEIAEELKRLLREVEEASKEIVRRMRELAREANKASEDILRTLEKLLEELRRRVEES

SEQ ID NO: 26462 - protein, 56 aa, Artificial Sequence; identical to SEQ ID NO: 25832
  Synthetic

SEQ ID NO: 26463 - protein, 59 aa, Artificial Sequence; identical to SEQ ID NO: 26461
  Synthetic

SEQ ID NO: 26464 - protein, 56 aa, Artificial Sequence; identical to SEQ ID NO: 25832
  Synthetic

SEQ ID NO: 26465 - protein, 60 aa, Artificial Sequence
  Synthetic
DAEEKAKKIEDVARRYAEEVKRVLDDLERLLRESEEEVERIVRKLEKLARDLEERVREGT

SEQ ID NO: 26466 - protein, 59 aa, Artificial Sequence; identical to SEQ ID NO: 25854
  Synthetic

SEQ ID NO: 26467 - protein, 60 aa, Artificial Sequence; identical to SEQ ID NO: 26465
  Synthetic

SEQ ID NO: 26468 - protein, 59 aa, Artificial Sequence; identical to SEQ ID NO: 25854
  Synthetic

SEQ ID NO: 26469 - protein, 59 aa, Artificial Sequence; identical to SEQ ID NO: 25887
  Synthetic

SEQ ID NO: 26470 - protein, 55 aa, Artificial Sequence
  Synthetic
EEALDDLRRLVKELADKLRKLLKDYKDLLKELKDEAKKLLDDYARLIEELEKKAR

SEQ ID NO: 26471 - protein, 59 aa, Artificial Sequence; identical to SEQ ID NO: 25887
  Synthetic

SEQ ID NO: 26472 - protein, 55 aa, Artificial Sequence; identical to SEQ ID NO: 26470
  Synthetic

SEQ ID NO: 26473 - protein, 60 aa, Artificial Sequence
  Synthetic
SREELLDRILEAIAKILEDLKRLIDENLARLEEVVRELERIIDRNLKLIREILDELKKGS

SEQ ID NO: 26474 - protein, 59 aa, Artificial Sequence; identical to SEQ ID NO: 25896
  Synthetic

SEQ ID NO: 26475 - protein, 60 aa, Artificial Sequence; identical to SEQ ID NO: 26473
  Synthetic

SEQ ID NO: 26476 - protein, 59 aa, Artificial Sequence; identical to SEQ ID NO: 25896
  Synthetic

SEQ ID NO: 26477 - protein, 61 aa, Artificial Sequence; identical to SEQ ID NO: 25897
  Synthetic

SEQ ID NO: 26478 - protein, 60 aa, Artificial Sequence; identical to SEQ ID NO: 25898
  Synthetic

SEQ ID NO: 26479 - protein, 61 aa, Artificial Sequence; identical to SEQ ID NO: 25897
  Synthetic

SEQ ID NO: 26480 - protein, 60 aa, Artificial Sequence; identical to SEQ ID NO: 25898
  Synthetic

SEQ ID NO: 26481 - protein, 60 aa, Artificial Sequence
  Synthetic
DREKSVRDIEEDLKRVLDKLRRRVETSKEELKKVLKADKENADELEKTLRDVVRELDRGI

SEQ ID NO: 26482 - protein, 56 aa, Artificial Sequence
  Synthetic
SEVAKELDEVIKRLLDNLKENTDRLKEVIDRNLADLRDLAEELRAVIERLLEDARR

SEQ ID NO: 26483 - protein, 60 aa, Artificial Sequence; identical to SEQ ID NO: 26481
  Synthetic

SEQ ID NO: 26484 - protein, 56 aa, Artificial Sequence; identical to SEQ ID NO: 26482
  Synthetic

SEQ ID NO: 26485 - protein, 59 aa, Artificial Sequence
  Synthetic
SLEEITKRLLELVEENLARHEEILRELLELAKRLAKEDRDILEEVLKLIEELLKLLEDN

SEQ ID NO: 26486 - protein, 60 aa, Artificial Sequence; identical to SEQ ID NO: 25950
  Synthetic

SEQ ID NO: 26487 - protein, 59 aa, Artificial Sequence; identical to SEQ ID NO: 26485
  Synthetic

SEQ ID NO: 26488 - protein, 60 aa, Artificial Sequence; identical to SEQ ID NO: 25950
  Synthetic

SEQ ID NO: 26489 - protein, 60 aa, Artificial Sequence
  Synthetic
SAEEAVEKLVRIARAIVKINEDLSREVVRILREIVRLNEETTRLLVEIAREVVKVVEDGG

SEQ ID NO: 26490 - protein, 59 aa, Artificial Sequence
  Synthetic
EELLRRLEELRKRLEKVLDDSAKELEKLKRELERLLEESRRKLEKLKRDLERVLEETRR

SEQ ID NO: 26491 - protein, 60 aa, Artificial Sequence; identical to SEQ ID NO: 26489
  Synthetic

SEQ ID NO: 26492 - protein, 59 aa, Artificial Sequence; identical to SEQ ID NO: 26490
  Synthetic

SEQ ID NO: 26493 - protein, 60 aa, Artificial Sequence
  Synthetic
REDEVLRDIERLLREIEEKIRRILEESTAELRKVEEEVKRIIERTKRELKAIKEDVERKG

SEQ ID NO: 26494 - protein, 56 aa, Artificial Sequence
  Synthetic
EDLLEKIKRVIREHIKALEKLARDLKEILRRHIEALKELARDLAEVIRKLLEDVKR

SEQ ID NO: 26495 - protein, 60 aa, Artificial Sequence; identical to SEQ ID NO: 26493
  Synthetic

SEQ ID NO: 26496 - protein, 56 aa, Artificial Sequence; identical to SEQ ID NO: 26494
  Synthetic

SEQ ID NO: 26497 - protein, 58 aa, Artificial Sequence
  Synthetic
SREDLLRSLAELIETILRKSSELLDRLLKLVREHSETSERLIRELKKILEDILKLIKG

SEQ ID NO: 26498 - protein, 56 aa, Artificial Sequence
  Synthetic
EKELRRIAEAVERVLRDHKAKNDKILRDVEEVLRRHLEELARILKDVKKVLDEARK

SEQ ID NO: 26499 - protein, 58 aa, Artificial Sequence; identical to SEQ ID NO: 26497
  Synthetic

SEQ ID NO: 26500 - protein, 56 aa, Artificial Sequence; identical to SEQ ID NO: 26498
  Synthetic

SEQ ID NO: 26501 - protein, 60 aa, Artificial Sequence; identical to SEQ ID NO: 25989
  Synthetic

SEQ ID NO: 26502 - protein, 56 aa, Artificial Sequence; identical to SEQ ID NO: 25990
  Synthetic

SEQ ID NO: 26503 - protein, 60 aa, Artificial Sequence; identical to SEQ ID NO: 25989
  Synthetic

SEQ ID NO: 26504 - protein, 56 aa, Artificial Sequence; identical to SEQ ID NO: 25990
  Synthetic

SEQ ID NO: 26505 - protein, 61 aa, Artificial Sequence
  Synthetic
SKEEDVRRLIEELVRELRRILEENRRMLKELVEKLEEVLRRSEEVWRRLAKELDELLKEGN

SEQ ID NO: 26506 - protein, 59 aa, Artificial Sequence; identical to SEQ ID NO: 25992
  Synthetic

SEQ ID NO: 26507 - protein, 61 aa, Artificial Sequence; identical to SEQ ID NO: 26505
  Synthetic

SEQ ID NO: 26508 - protein, 59 aa, Artificial Sequence; identical to SEQ ID NO: 25992
  Synthetic

SEQ ID NO: 26509 - protein, 59 aa, Artificial Sequence
  Synthetic
SEKEAIKEVAELLKALIDDLLRLLKEDVDTARRVLDEIKKLLEENESIAREVLRRLREG

SEQ ID NO: 26510 - protein, 56 aa, Artificial Sequence
  Synthetic
ETDLDRIVKEMEKVLEDSIRELEKLVKRLEDILRESEKALRDLLSELAKVLEEVRT

SEQ ID NO: 26511 - protein, 59 aa, Artificial Sequence; identical to SEQ ID NO: 26509
  Synthetic

SEQ ID NO: 26512 - protein, 56 aa, Artificial Sequence; identical to SEQ ID NO: 26510
  Synthetic

SEQ ID NO: 26513 - protein, 58 aa, Artificial Sequence; identical to SEQ ID NO: 26001
  Synthetic

SEQ ID NO: 26514 - protein, 56 aa, Artificial Sequence
  Synthetic
EDTVRELTELVRRLLKRVEELLKRSLEILRELIKAIADAIKESLDILDRLLREVAR

SEQ ID NO: 26515 - protein, 58 aa, Artificial Sequence; identical to SEQ ID NO: 26001
  Synthetic

SEQ ID NO: 26516 - protein, 56 aa, Artificial Sequence; identical to SEQ ID NO: 26514
  Synthetic

SEQ ID NO: 26517 - protein, 59 aa, Artificial Sequence
  Synthetic
SEAERLADEVRKAVKKSEEDNETLVREVEKAVRELKKNNKTWVDEVRKLMKRLVDLLRD

SEQ ID NO: 26518 - protein, 60 aa, Artificial Sequence; identical to SEQ ID NO: 26024
  Synthetic

SEQ ID NO: 26519 - protein, 59 aa, Artificial Sequence; identical to SEQ ID NO: 26517
  Synthetic

SEQ ID NO: 26520 - protein, 60 aa, Artificial Sequence; identical to SEQ ID NO: 26024
  Synthetic

SEQ ID NO: 26521 - protein, 61 aa, Artificial Sequence
  Synthetic
SEKDEVTRRIRELLKEAEETNREAIERIKRLLDRVREAVEEVAKRSEELLRRLKKVLDRGL

SEQ ID NO: 26522 - protein, 57 aa, Artificial Sequence
  Synthetic
KEDLLREIARILAESLRLIRELLKEIEKIVKEIIELLERLNDELRKIIEAILETTKK

SEQ ID NO: 26523 - protein, 61 aa, Artificial Sequence; identical to SEQ ID NO: 26521
  Synthetic

SEQ ID NO: 26524 - protein, 57 aa, Artificial Sequence; identical to SEQ ID NO: 26522
  Synthetic

SEQ ID NO: 26525 - protein, 59 aa, Artificial Sequence
  Synthetic
SAEDLVRRVKDLVDKLEDKLRKVVRTNERLWEEIRKRLEELVRRNKELWDALVEKLKAG

SEQ ID NO: 26526 - protein, 56 aa, Artificial Sequence
  Synthetic
IRVLVELVRRHNKVLKELVEELEKLVRDHNRVVEEVVRELVELLSRAVEVIKEVVK

SEQ ID NO: 26527 - protein, 59 aa, Artificial Sequence; identical to SEQ ID NO: 26525
  Synthetic

SEQ ID NO: 26528 - protein, 56 aa, Artificial Sequence; identical to SEQ ID NO: 26526
  Synthetic

SEQ ID NO: 26529 - protein, 59 aa, Artificial Sequence
  Synthetic
SEKELVDDIRRILEEILRLLRSLLEEVIRLLEENEKLVRRHLKTVIDILRRVAKLLDEN

SEQ ID NO: 26530 - protein, 56 aa, Artificial Sequence; identical to SEQ ID NO: 26068
  Synthetic

SEQ ID NO: 26531 - protein, 59 aa, Artificial Sequence; identical to SEQ ID NO: 26529
  Synthetic

SEQ ID NO: 26532 - protein, 56 aa, Artificial Sequence; identical to SEQ ID NO: 26068
  Synthetic

SEQ ID NO: 26533 - protein, 62 aa, Artificial Sequence
  Synthetic
DEERLAEELERVLDRNRKLLEEALRELRRVIEENRKSVKRLLDELKRVLDELLKVLRELSRG

SEQ ID NO: 26534 - protein, 56 aa, Artificial Sequence
  Synthetic
EEDVERAVKEIRDRLRKLLEDYERAVRRLEDKLRRVRERYEAVLKRIKDKLEETKR

SEQ ID NO: 26535 - protein, 62 aa, Artificial Sequence; identical to SEQ ID NO: 26533
  Synthetic

SEQ ID NO: 26536 - protein, 56 aa, Artificial Sequence; identical to SEQ ID NO: 26534
  Synthetic

SEQ ID NO: 26537 - protein, 61 aa, Artificial Sequence
  Synthetic
SRVEELKKLIEDILRISREVVERIARVAEDIHRINRRVLDDLRKLIEDILRTVEEILARKV

SEQ ID NO: 26538 - protein, 55 aa, Artificial Sequence; identical to SEQ ID NO: 26076
  Synthetic

SEQ ID NO: 26539 - protein, 62 aa, Artificial Sequence
  Synthetic
SRVEELKKLIEDILRISREVVERIARVAEDIHRINRRVLDDLRKLIEDILRTVEEILARKVS

SEQ ID NO: 26540 - protein, 55 aa, Artificial Sequence; identical to SEQ ID NO: 26076
  Synthetic

SEQ ID NO: 26541 - protein, 60 aa, Artificial Sequence
  Synthetic
DEDRRLEDAVAKLRKEHADIMKKLDDIMRELDEDHARIKERLDRILEELKALLTRVLRET

SEQ ID NO: 26542 - protein, 54 aa, Artificial Sequence
  Synthetic
EIERIIRRVIEVIREILDLVRKVNKKALRVIEEILEDLARVNKKAVDAIDELAK

SEQ ID NO: 26543 - protein, 60 aa, Artificial Sequence; identical to SEQ ID NO: 26541
  Synthetic

SEQ ID NO: 26544 - protein, 54 aa, Artificial Sequence; identical to SEQ ID NO: 26542
  Synthetic

SEQ ID NO: 26545 - protein, 61 aa, Artificial Sequence
  Synthetic
DEVEELLKRVRELLKASEELVRKILEDVKRLLERSIEEVEDLLRKVEELLKRLLDLVERGG

SEQ ID NO: 26546 - protein, 56 aa, Artificial Sequence
  Synthetic
EDLIRDVDRVLKEIMDLLRDLVRRTKELLEELLRLLEELVRAHKELVRSILDEIRK

SEQ ID NO: 26547 - protein, 61 aa, Artificial Sequence; identical to SEQ ID NO: 26545
  Synthetic

SEQ ID NO: 26548 - protein, 56 aa, Artificial Sequence; identical to SEQ ID NO: 26546
  Synthetic

SEQ ID NO: 26549 - protein, 59 aa, Artificial Sequence
  Synthetic
SEAEELLRELEELLKKSEKVLEDLLRKNAELIKDSKARLDEVRRKVEKLAEEVEEVIRR

SEQ ID NO: 26550 - protein, 56 aa, Artificial Sequence
  Synthetic
KDAVRKLIEELKKLLEDLVEHHERLLKEDHERLKALLDHHRELLKTVLTILRETAK

SEQ ID NO: 26551 - protein, 59 aa, Artificial Sequence; identical to SEQ ID NO: 26549
  Synthetic

SEQ ID NO: 26552 - protein, 56 aa, Artificial Sequence; identical to SEQ ID NO: 26550
  Synthetic

SEQ ID NO: 26553 - protein, 59 aa, Artificial Sequence
  Synthetic
DEEELLRRVTEELKRLLDEARKLHEDVKRELEKLLKENDDLLADVKRKLESLLEALKRG

SEQ ID NO: 26554 - protein, 57 aa, Artificial Sequence
  Synthetic
ADKLLERIRALLETLLEVLKRDNEEIKRILEELLRVAEENLRRIKEIIDRLLDATRR

SEQ ID NO: 26555 - protein, 59 aa, Artificial Sequence; identical to SEQ ID NO: 26553
  Synthetic

SEQ ID NO: 26556 - protein, 57 aa, Artificial Sequence; identical to SEQ ID NO: 26554
  Synthetic

SEQ ID NO: 26557 - protein, 59 aa, Artificial Sequence
  Synthetic
DAEEVVKRLADVLRENDETIRKVVEDLVRIAEENDRLWKKLVEDIAEILRRIVELLRRG

SEQ ID NO: 26558 - protein, 59 aa, Artificial Sequence
  Synthetic
EDVKRALEELVSRLRKLLEDVKKASEDIVREVERIVRELAKRSDEILKKLEDIVEKLRE

SEQ ID NO: 26559 - protein, 59 aa, Artificial Sequence; identical to SEQ ID NO: 26557
  Synthetic

SEQ ID NO: 26560 - protein, 59 aa, Artificial Sequence; identical to SEQ ID NO: 26558
  Synthetic

SEQ ID NO: 26561 - protein, 56 aa, Artificial Sequence
  Synthetic
DKDKRLEELLKRLKELNDKTFEELERILEELKRANEASLREAERILEELRARIEGG

SEQ ID NO: 26562 - protein, 59 aa, Artificial Sequence; identical to SEQ ID NO: 26128
  Synthetic

SEQ ID NO: 26563 - protein, 56 aa, Artificial Sequence; identical to SEQ ID NO: 26561
  Synthetic

SEQ ID NO: 26564 - protein, 59 aa, Artificial Sequence; identical to SEQ ID NO: 26128
  Synthetic

SEQ ID NO: 26565 - protein, 56 aa, Artificial Sequence
  Synthetic
SKEETLKRLLDELEKRNRETVERLERLLKELEDRNRASLEELEAVLEELERKIEES

SEQ ID NO: 26566 - protein, 59 aa, Artificial Sequence
  Synthetic
EEVKDIVRAMEEVIRRLIEILRRDVELNLDVAKKLLELLKEDSKLNLDVARELLELLDR

SEQ ID NO: 26567 - protein, 56 aa, Artificial Sequence; identical to SEQ ID NO: 26565
  Synthetic

SEQ ID NO: 26568 - protein, 59 aa, Artificial Sequence; identical to SEQ ID NO: 26566
  Synthetic

SEQ ID NO: 26569 - protein, 57 aa, Artificial Sequence
  Synthetic
DEEETLRRLLERKVELAKEYLDVSKEVIDRTTKLLDEYLKTSKRIVDATVELLERGD

SEQ ID NO: 26570 - protein, 60 aa, Artificial Sequence
  Synthetic
SREALEEARRRLEELLRELNEITKDLEAKLEKLLRDLNELTKALEEELKRLLDELKKRTD

SEQ ID NO: 26571 - protein, 57 aa, Artificial Sequence; identical to SEQ ID NO: 26569
  Synthetic

SEQ ID NO: 26572 - protein, 60 aa, Artificial Sequence; identical to SEQ ID NO: 26570
  Synthetic

SEQ ID NO: 26573 - protein, 56 aa, Artificial Sequence
  Synthetic
SEAERTKESLKKVLKALVDLNRELLRKLEENMRELTKLNEEVKRALKEVLDKVREG

SEQ ID NO: 26574 - protein, 59 aa, Artificial Sequence
  Synthetic
EEIRKIVEEILKEIKELADRYREEVRKSKDKLRSILEDYKRKVDELKERLRELIEEVET

SEQ ID NO: 26575 - protein, 56 aa, Artificial Sequence; identical to SEQ ID NO: 26573
  Synthetic

SEQ ID NO: 26576 - protein, 59 aa, Artificial Sequence; identical to SEQ ID NO: 26574
  Synthetic

SEQ ID NO: 26577 - protein, 61 aa, Artificial Sequence
  Synthetic
SEVEDILRRLAELNKRLIDKLRELIDRIARLNEELLRVVEDILSRLKRLADELIRVVRERG

SEQ ID NO: 26578 - protein, 56 aa, Artificial Sequence
  Synthetic
DEDLKRLLEKLKEDVERVLKEVRDRTAESLKHLEDVIRELEKKTEDSLRHMEERRK

SEQ ID NO: 26579 - protein, 61 aa, Artificial Sequence; identical to SEQ ID NO: 26577
  Synthetic

SEQ ID NO: 26580 - protein, 56 aa, Artificial Sequence; identical to SEQ ID NO: 26578
  Synthetic

SEQ ID NO: 26581 - protein, 60 aa, Artificial Sequence
  Synthetic
DEERIIKTLEDINAKLVEDIKRILDKVAELNERLADAIRKILEETKRILEATTRKVRKDG

SEQ ID NO: 26582 - protein, 56 aa, Artificial Sequence
  Synthetic
KDTLRTVEKLVEDVKRRLDKLLEDYKRLIEEVKKELDKLLKEYEDALREIKKRIDE

SEQ ID NO: 26583 - protein, 60 aa, Artificial Sequence; identical to SEQ ID NO: 26581
  Synthetic

SEQ ID NO: 26584 - protein, 56 aa, Artificial Sequence; identical to SEQ ID NO: 26582
  Synthetic

SEQ ID NO: 26585 - protein, 58 aa, Artificial Sequence; identical to SEQ ID NO: 26193
  Synthetic

SEQ ID NO: 26586 - protein, 56 aa, Artificial Sequence
  Synthetic
REEVKRVLEEARDELRRLLEEYKAIIEELERELERLLREHREVIRRIKEEIDKSSK

SEQ ID NO: 26587 - protein, 58 aa, Artificial Sequence; identical to SEQ ID NO: 26193
  Synthetic

SEQ ID NO: 26588 - protein, 56 aa, Artificial Sequence; identical to SEQ ID NO: 26586
  Synthetic

SEQ ID NO: 26589 - protein, 59 aa, Artificial Sequence; identical to SEQ ID NO: 26195
  Synthetic

SEQ ID NO: 26590 - protein, 56 aa, Artificial Sequence; identical to SEQ ID NO: 26196
  Synthetic

SEQ ID NO: 26591 - protein, 59 aa, Artificial Sequence; identical to SEQ ID NO: 26195
  Synthetic

SEQ ID NO: 26592 - protein, 56 aa, Artificial Sequence; identical to SEQ ID NO: 26196
  Synthetic

SEQ ID NO: 26593 - protein, 60 aa, Artificial Sequence
  Synthetic
SLEEIVKKLEDLNKKAVEILRRVLEEHEKLVEKVKKVLRDVLRLLEKVVREVIETLKKGD

SEQ ID NO: 26594 - protein, 56 aa, Artificial Sequence
  Synthetic
EEVLRKLKEIIKELKDRLKKLLDDYERIIDELRAELERVLREYEKILEDLRKELED

SEQ ID NO: 26595 - protein, 60 aa, Artificial Sequence; identical to SEQ ID NO: 26593
  Synthetic

SEQ ID NO: 26596 - protein, 56 aa, Artificial Sequence; identical to SEQ ID NO: 26594
  Synthetic

SEQ ID NO: 26597 - protein, 59 aa, Artificial Sequence
  Synthetic
SADEALEELVRRLLEVLKTVLERTKELSRDDLRVVKEVLRIIEELVKRLLKVIRDGLDD

SEQ ID NO: 26598 - protein, 59 aa, Artificial Sequence
  Synthetic
EDVRRDIERLLEELKRRVERLLEDIERLLAELEKLNEDVLRENKALLEDLERRVRERKK

SEQ ID NO: 26599 - protein, 59 aa, Artificial Sequence; identical to SEQ ID NO: 26597
  Synthetic

SEQ ID NO: 26600 - protein, 59 aa, Artificial Sequence; identical to SEQ ID NO: 26598
  Synthetic

SEQ ID NO: 26601 - protein, 59 aa, Artificial Sequence
  Synthetic
REVEEIERRLRELVRRSDELVRTVAEELEKLVRRNKKLVEDVMKRLRDLVERLRELVDA

SEQ ID NO: 26602 - protein, 58 aa, Artificial Sequence
  Synthetic
SGSKEVLDILERAVEVVRRVIKALKEVLERHVDATREVIERVKRVNKRLLEAVREVVT

SEQ ID NO: 26603 - protein, 58 aa, Artificial Sequence
  Synthetic
GVPEEIDRELKRVVEELRRLHEEIKERLDDVARRSEEELRRIIKKLKEVVKEIRKKLK

SEQ ID NO: 26604 - protein, 55 aa, Artificial Sequence
  Synthetic
DLLRKLEEELRRIKEKLRKALEELEREHRELEKELDKLHDESRKEHERIEEELRR

SEQ ID NO: 26605 - protein, 57 aa, Artificial Sequence
  Synthetic
DEDLLEKIKRVIREHIKALEKLARDLKEILRRHIEALKELARDLAEVIRKLLEDVKR

SEQ ID NO: 26606 - protein, 54 aa, Artificial Sequence
  Synthetic
DLERLRRKVEELEDRLRRLLEKLARDSAELMRELERILDRYARESEELDRRLAE

SEQ ID NO: 26607 - protein, 54 aa, Artificial Sequence
  Synthetic
DLEDILRKNLDRLRKLLERLREILRENLEALKKTLKRLEDVVREILEDLKRERK

SEQ ID NO: 26608 - protein, 54 aa, Artificial Sequence; identical to SEQ ID NO: 26606
  Synthetic

SEQ ID NO: 26609 - protein, 58 aa, Artificial Sequence; identical to SEQ ID NO: 26602
  Synthetic

SEQ ID NO: 26610 - protein, 54 aa, Artificial Sequence; identical to SEQ ID NO: 26606
  Synthetic

SEQ ID NO: 26611 - protein, 58 aa, Artificial Sequence
  Synthetic
RLIEEVVRLLRENLDVVRRILEALAKLIKELLEALEEVLRRNKELIRELLRVLDEALK

SEQ ID NO: 26612 - protein, 55 aa, Artificial Sequence
  Synthetic
DIVRAMEEVIRRLIEILRRDVELNLDVAKKLLELLKEDSKLNLDVARELLELLDR

SEQ ID NO: 26613 - protein, 55 aa, Artificial Sequence; identical to SEQ ID NO: 26612
  Synthetic

SEQ ID NO: 26614 - protein, 58 aa, Artificial Sequence; identical to SEQ ID NO: 26611
  Synthetic

SEQ ID NO: 26615 - protein, 58 aa, Artificial Sequence; identical to SEQ ID NO: 26611
  Synthetic

SEQ ID NO: 26616 - protein, 55 aa, Artificial Sequence; identical to SEQ ID NO: 26604
  Synthetic

SEQ ID NO: 26617 - protein, 55 aa, Artificial Sequence; identical to SEQ ID NO: 26604
  Synthetic

SEQ ID NO: 26618 - protein, 58 aa, Artificial Sequence
  Synthetic
ELAREVERVIKELLDKSKEILERIERAIDELLKVSEEILKLSEDASEELLKILREFAK

SEQ ID NO: 26619 - protein, 58 aa, Artificial Sequence
  Synthetic
DVKDIIRTILEVARDLLRLLEEDSRTNSEVVKRLLDLLREDSKANSEVVKRLLDVLRE

SEQ ID NO: 26620 - protein, 54 aa, Artificial Sequence; identical to SEQ ID NO: 26606
  Synthetic

SEQ ID NO: 26621 - protein, 54 aa, Artificial Sequence; identical to SEQ ID NO: 26606
  Synthetic

SEQ ID NO: 26622 - protein, 58 aa, Artificial Sequence; identical to SEQ ID NO: 26611
  Synthetic

SEQ ID NO: 26623 - protein, 54 aa, Artificial Sequence; identical to SEQ ID NO: 26607
  Synthetic

SEQ ID NO: 26624 - protein, 55 aa, Artificial Sequence; identical to SEQ ID NO: 26604
  Synthetic

SEQ ID NO: 26625 - protein, 57 aa, Artificial Sequence; identical to SEQ ID NO: 26605
  Synthetic

SEQ ID NO: 26626 - protein, 58 aa, Artificial Sequence
  Synthetic
ELVRIAIEVLKRLLEIIEELVRLNNEILERLLKIVRELHKDNIKILEDLLRIIEEVLR

SEQ ID NO: 26627 - protein, 58 aa, Artificial Sequence; identical to SEQ ID NO: 26626
  Synthetic

SEQ ID NO: 26628 - protein, 58 aa, Artificial Sequence
  Synthetic
RLARLLKALADKLIRVLEEILKINEELNRKIIKFARENLERNRRVNKKVIEVLREAAR

SEQ ID NO: 26629 - protein, 54 aa, Artificial Sequence; identical to SEQ ID NO: 26606
  Synthetic

SEQ ID NO: 26630 - protein, 58 aa, Artificial Sequence; identical to SEQ ID NO: 26626
  Synthetic

SEQ ID NO: 26631 - protein, 58 aa, Artificial Sequence; identical to SEQ ID NO: 26626
  Synthetic

SEQ ID NO: 26632 - protein, 55 aa, Artificial Sequence; identical to SEQ ID NO: 26612
  Synthetic

SEQ ID NO: 26633 - protein, 58 aa, Artificial Sequence
  Synthetic
RKIAKIIEELKRLLEDLARDTRRVIEEAKRLLKEWRDRNKEVADTLKKLLEDLIRKIR

SEQ ID NO: 26634 - protein, 55 aa, Artificial Sequence; identical to SEQ ID NO: 26604
  Synthetic

SEQ ID NO: 26635 - protein, 55 aa, Artificial Sequence; identical to SEQ ID NO: 26604
  Synthetic

SEQ ID NO: 26636 - protein, 58 aa, Artificial Sequence; identical to SEQ ID NO: 26633
  Synthetic

SEQ ID NO: 26637 - protein, 58 aa, Artificial Sequence; identical to SEQ ID NO: 26626
  Synthetic

SEQ ID NO: 26638 - protein, 57 aa, Artificial Sequence
  Synthetic
TVRRLREALKKLEDDLRKIERDAEREYKKLKDELEELTERYRREIRKLKEELKADRK

SEQ ID NO: 26639 - protein, 58 aa, Artificial Sequence
  Synthetic
DEAERRRRELKDKLDRLREEHEEVKRRLEEELTRLRETHKKIEKELREALKRVRDRST

SEQ ID NO: 26640 - protein, 58 aa, Artificial Sequence; identical to SEQ ID NO: 26639
  Synthetic

SEQ ID NO: 26641 - protein, 54 aa, Artificial Sequence; identical to SEQ ID NO: 26607
  Synthetic

SEQ ID NO: 26642 - protein, 54 aa, Artificial Sequence; identical to SEQ ID NO: 26606
  Synthetic

SEQ ID NO: 26643 - protein, 58 aa, Artificial Sequence; identical to SEQ ID NO: 26639
  Synthetic

SEQ ID NO: 26644 - protein, 58 aa, Artificial Sequence; identical to SEQ ID NO: 26639
  Synthetic

SEQ ID NO: 26645 - protein, 58 aa, Artificial Sequence; identical to SEQ ID NO: 26639
  Synthetic

SEQ ID NO: 26646 - protein, 56 aa, Artificial Sequence
  Synthetic
DKAVEELEKALEEIKRRLKEVIDRYEDELRKLRKEYKEKIDKYERKLEEIERRERT

SEQ ID NO: 26647 - protein, 58 aa, Artificial Sequence
  Synthetic
DVKRALEELVSRLRKLLEDVKKASEDIVREVERIVRELAKRSDEILKKLEDIVEKLRE

SEQ ID NO: 26648 - protein, 58 aa, Artificial Sequence; identical to SEQ ID NO: 26647
  Synthetic

SEQ ID NO: 26649 - protein, 58 aa, Artificial Sequence; identical to SEQ ID NO: 26639
  Synthetic

SEQ ID NO: 26650 - protein, 58 aa, Artificial Sequence; identical to SEQ ID NO: 26647
  Synthetic

SEQ ID NO: 26651 - protein, 58 aa, Artificial Sequence
  Synthetic
EVKRRLEEKERRIRTRYEELRRRLRKRVKDYEDKLREIEKKVRRDAERIEEELERAKK

SEQ ID NO: 26652 - protein, 58 aa, Artificial Sequence; identical to SEQ ID NO: 26639
  Synthetic

SEQ ID NO: 26653 - protein, 58 aa, Artificial Sequence
  Synthetic
KIAEEIERELEELRRMIKRLHEDLERKLKESEDELREIEARLEEKIRRLEEKLERKRR

SEQ ID NO: 26654 - protein, 58 aa, Artificial Sequence; identical to SEQ ID NO: 26653
  Synthetic

SEQ ID NO: 26655 - protein, 56 aa, Artificial Sequence; identical to SEQ ID NO: 26646
  Synthetic

SEQ ID NO: 26656 - protein, 58 aa, Artificial Sequence; identical to SEQ ID NO: 26653
  Synthetic

SEQ ID NO: 26657 - protein, 58 aa, Artificial Sequence; identical to SEQ ID NO: 26626
  Synthetic

SEQ ID NO: 26658 - protein, 55 aa, Artificial Sequence; identical to SEQ ID NO: 26076
  Synthetic

SEQ ID NO: 26659 - protein, 58 aa, Artificial Sequence; identical to SEQ ID NO: 26647
  Synthetic

SEQ ID NO: 26660 - protein, 58 aa, Artificial Sequence; identical to SEQ ID NO: 26639
  Synthetic

SEQ ID NO: 26661 - protein, 58 aa, Artificial Sequence; identical to SEQ ID NO: 26639
  Synthetic

SEQ ID NO: 26662 - protein, 58 aa, Artificial Sequence
  Synthetic
TLREVVRKVLEEAKRLLDELEEVHKRVKKELEDIIEENRRVVKRVRDELREIKRELDE

SEQ ID NO: 26663 - protein, 58 aa, Artificial Sequence; identical to SEQ ID NO: 26647
  Synthetic

SEQ ID NO: 26664 - protein, 58 aa, Artificial Sequence; identical to SEQ ID NO: 26647
  Synthetic

SEQ ID NO: 26665 - protein, 58 aa, Artificial Sequence; identical to SEQ ID NO: 26639
  Synthetic

SEQ ID NO: 26666 - protein, 58 aa, Artificial Sequence; identical to SEQ ID NO: 26639
  Synthetic

SEQ ID NO: 26667 - protein, 58 aa, Artificial Sequence; identical to SEQ ID NO: 26653
  Synthetic

SEQ ID NO: 26668 - protein, 58 aa, Artificial Sequence; identical to SEQ ID NO: 26647
  Synthetic

SEQ ID NO: 26669 - protein, 58 aa, Artificial Sequence
  Synthetic
SEAERLADEVRKAVKKSEEDNETLVREVEKAVRELKKNNKTWVDEVRKLMKRLVDLLR

SEQ ID NO: 26670 - protein, 58 aa, Artificial Sequence; identical to SEQ ID NO: 26669
  Synthetic

SEQ ID NO: 26671 - protein, 58 aa, Artificial Sequence
  Synthetic
DKDKRLEELLKRLKELNDKTFEELERILEELKRANEASLREAERILEELRARIEGGNL

SEQ ID NO: 26672 - protein, 58 aa, Artificial Sequence
  Synthetic
SEAEDLEELIKELAELLKDVIRKLEKINRRLVKILEDIIRRLKEISKEAEEELRKGTV

SEQ ID NO: 26673 - protein, 58 aa, Artificial Sequence
  Synthetic
SDKEEIKRRVEKTARDLETEHDKIKKRLEDTVRDIKRELDELLEKYERVLRKIEKTLR

SEQ ID NO: 26674 - protein, 58 aa, Artificial Sequence
  Synthetic
SEAEKIREALETNLRLLEELIKRLKEILDTHNELLRRVIETLERLLKELLELLEEGGL

SEQ ID NO: 26675 - protein, 58 aa, Artificial Sequence; identical to SEQ ID NO: 26674
  Synthetic

SEQ ID NO: 26676 - protein, 58 aa, Artificial Sequence
  Synthetic
SKEERLREVAEKHKKDLEDIVKRVDEAAKETARRLEEILKRLEEVLKKILDDLEKGPD

SEQ ID NO: 26677 - protein, 58 aa, Artificial Sequence
  Synthetic
SLEEITKRLLELVEENLARHEEILRELLELAKRLAKEDRDILEEVLKLIEELLKLLED

SEQ ID NO: 26678 - protein, 58 aa, Artificial Sequence
  Synthetic
SKEETLKRLLDELEKRNRETVERLERLLKELEDRNRASLEELEAVLEELERKIEESGL

SEQ ID NO: 26679 - protein, 58 aa, Artificial Sequence; identical to SEQ ID NO: 26678
  Synthetic

SEQ ID NO: 26680 - protein, 58 aa, Artificial Sequence; identical to SEQ ID NO: 26678
  Synthetic

SEQ ID NO: 26681 - protein, 58 aa, Artificial Sequence
  Synthetic
STREKAKKVLDTLRADNEDMKRVVEKILRALKRTNERAEKLAREITEEIKRILKEVGV

SEQ ID NO: 26682 - protein, 58 aa, Artificial Sequence
  Synthetic
DAEEVVKRLADVLRENDETIRKVVEDLVRIAEENDRLWKKLVEDIAEILRRIVELLRR

SEQ ID NO: 26683 - protein, 58 aa, Artificial Sequence; identical to SEQ ID NO: 26678
  Synthetic

SEQ ID NO: 26684 - protein, 58 aa, Artificial Sequence; identical to SEQ ID NO: 26681
  Synthetic

SEQ ID NO: 26685 - protein, 58 aa, Artificial Sequence
  Synthetic
SKEEEVEKVLRKWEEILRRLIEENKRANDKIRREYEELVKEIRRVLEEIKEVAERLGV

SEQ ID NO: 26686 - protein, 58 aa, Artificial Sequence
  Synthetic
DREKSVRDIEEDLKRVLDKLRRRVETSKEELKKVLKADKENADELEKTLRDVVRELDR

SEQ ID NO: 26687 - protein, 58 aa, Artificial Sequence; identical to SEQ ID NO: 26673
  Synthetic

SEQ ID NO: 26688 - protein, 58 aa, Artificial Sequence; identical to SEQ ID NO: 26681
  Synthetic

SEQ ID NO: 26689 - protein, 58 aa, Artificial Sequence
  Synthetic
SKDEELARLLEELVERWRKIVEDLERDHRRLVKEIRELVERIRKKLEELVDRIRKNGI

SEQ ID NO: 26690 - protein, 58 aa, Artificial Sequence; identical to SEQ ID NO: 26669
  Synthetic

SEQ ID NO: 26691 - protein, 58 aa, Artificial Sequence; identical to SEQ ID NO: 26689
  Synthetic

SEQ ID NO: 26692 - protein, 58 aa, Artificial Sequence
  Synthetic
KEIEETLKELEDLNREMVETNRRVLEETRRLNKETVDRVKATLDELAKMLKKLVDDVR

SEQ ID NO: 26693 - protein, 58 aa, Artificial Sequence; identical to SEQ ID NO: 26669
  Synthetic

SEQ ID NO: 26694 - protein, 58 aa, Artificial Sequence; identical to SEQ ID NO: 26678
  Synthetic

SEQ ID NO: 26695 - protein, 58 aa, Artificial Sequence
  Synthetic
DKAEVLREALKLLKDLLEELIKIHEESLKRILDLIDTLVKVHEDALRALKELLERSGL

SEQ ID NO: 26696 - protein, 58 aa, Artificial Sequence; identical to SEQ ID NO: 26685
  Synthetic

SEQ ID NO: 26697 - protein, 58 aa, Artificial Sequence; identical to SEQ ID NO: 26678
  Synthetic

SEQ ID NO: 26698 - protein, 56 aa, Artificial Sequence
  Synthetic
SERVKEILERILRVVEEAVRLNEESLRRILDVVRKAVKLDRESLKKILDVVEEAVR

SEQ ID NO: 26699 - protein, 56 aa, Artificial Sequence; identical to SEQ ID NO: 26698
  Synthetic

SEQ ID NO: 26700 - protein, 57 aa, Artificial Sequence
  Synthetic
DERRIAERIRELLRESKKLVRDVVEEAKRLLKENRDSTRKIIEDIRRLLRKIEDSTR

SEQ ID NO: 26701 - protein, 55 aa, Artificial Sequence
  Synthetic
DALSRLLEELLRVVDDLIRVLKELIDKSRKVIEELLELLKRINEENLKVLAEIIK

SEQ ID NO: 26702 - protein, 57 aa, Artificial Sequence; identical to SEQ ID NO: 26700
  Synthetic

SEQ ID NO: 26703 - protein, 58 aa, Artificial Sequence
  Synthetic
EALRKLVELLVEVLRRLIRVNRELVKLLREVLERLLRILRESVKKLKRLIEKVIKDAT

SEQ ID NO: 26704 - protein, 58 aa, Artificial Sequence; identical to SEQ ID NO: 26703
  Synthetic

SEQ ID NO: 26705 - protein, 58 aa, Artificial Sequence
  Synthetic
AAKRLVEELLKAVTDLSRKNKRILEELLKAIETLSDENKKILTEILDALRRLVEKIEK

SEQ ID NO: 26706 - protein, 58 aa, Artificial Sequence; identical to SEQ ID NO: 26703
  Synthetic

SEQ ID NO: 26707 - protein, 58 aa, Artificial Sequence; identical to SEQ ID NO: 26703
  Synthetic

SEQ ID NO: 26708 - protein, 55 aa, Artificial Sequence; identical to SEQ ID NO: 26701
  Synthetic

SEQ ID NO: 26709 - protein, 55 aa, Artificial Sequence; identical to SEQ ID NO: 26701
  Synthetic

SEQ ID NO: 26710 - protein, 58 aa, Artificial Sequence
  Synthetic
RAVKKLDEIVKEVAKKLEDVVRANEELWRALVELNKESVRRLREIVERVARDLEETAR

SEQ ID NO: 26711 - protein, 58 aa, Artificial Sequence
  Synthetic
DRLDKVEELVKKLLEDTKRTVDRVRELVRKILKKSRETLEELERLIEKILRELEKDAR

SEQ ID NO: 26712 - protein, 55 aa, Artificial Sequence; identical to SEQ ID NO: 26701
  Synthetic

SEQ ID NO: 26713 - protein, 58 aa, Artificial Sequence; identical to SEQ ID NO: 26710
  Synthetic

SEQ ID NO: 26714 - protein, 58 aa, Artificial Sequence; identical to SEQ ID NO: 26710
  Synthetic

SEQ ID NO: 26715 - protein, 57 aa, Artificial Sequence
  Synthetic
SEDDLKRVVDEVEKKLRELKRRYAEALERIKEKIKELKDRYERAVREVVAELRKTTK

SEQ ID NO: 26716 - protein, 58 aa, Artificial Sequence; identical to SEQ ID NO: 26710
  Synthetic

SEQ ID NO: 26717 - protein, 55 aa, Artificial Sequence; identical to SEQ ID NO: 26076
  Synthetic

SEQ ID NO: 26718 - protein, 57 aa, Artificial Sequence; identical to SEQ ID NO: 26715
  Synthetic

SEQ ID NO: 26719 - protein, 58 aa, Artificial Sequence
  Synthetic
DEAKELLDEIRKAVKESEDRLEKLLRDYEKELRRLEKELRDLKRRIEEKLEELRRGSL

SEQ ID NO: 26720 - protein, 58 aa, Artificial Sequence
  Synthetic
SEKEDAARKLRKLVEELTREYEELVKKLERLIEEIEKVSEESVRKLEKLLAEISEEVR

SEQ ID NO: 26721 - protein, 58 aa, Artificial Sequence
  Synthetic
SEDEIIKKIIEDLRRVLKEVEEIHKEVEERLDKVLKEAEEMHKEVLKELDRVLDEVKR

SEQ ID NO: 26722 - protein, 58 aa, Artificial Sequence
  Synthetic
SKAEEIAEKLDRLLEENRRALEEITTRLDDLLRRNKDALRKVMEKLKRLLDDLRRGGI

SEQ ID NO: 26723 - protein, 58 aa, Artificial Sequence
  Synthetic
SEKEKLLKESEEEVRRLRRTLEELLRKYREVLERLRKELREIEERVRDVVRRLKEVLD

SEQ ID NO: 26724 - protein, 58 aa, Artificial Sequence; identical to SEQ ID NO: 26720
  Synthetic

SEQ ID NO: 26725 - protein, 58 aa, Artificial Sequence
  Synthetic
SKEETLRKEAEDLLRRLEELTRRLEKKARELLERAKKLSRDLAEELKRLLKELREKGV

SEQ ID NO: 26726 - protein, 58 aa, Artificial Sequence; identical to SEQ ID NO: 26720
  Synthetic

SEQ ID NO: 26727 - protein, 58 aa, Artificial Sequence; identical to SEQ ID NO: 26722
  Synthetic

SEQ ID NO: 26728 - protein, 58 aa, Artificial Sequence; identical to SEQ ID NO: 26720
  Synthetic

SEQ ID NO: 26729 - protein, 58 aa, Artificial Sequence; identical to SEQ ID NO: 26722
  Synthetic

SEQ ID NO: 26730 - protein, 58 aa, Artificial Sequence; identical to SEQ ID NO: 26725
  Synthetic

SEQ ID NO: 26731 - protein, 58 aa, Artificial Sequence
  Synthetic
SRVEELKKLIEDILRISREVVERIKRVAEDIHRINRRVLDDLRKLIEDILRTVEEILA

SEQ ID NO: 26732 - protein, 58 aa, Artificial Sequence; identical to SEQ ID NO: 26725
  Synthetic

SEQ ID NO: 26733 - protein, 58 aa, Artificial Sequence; identical to SEQ ID NO: 26722
  Synthetic

SEQ ID NO: 26734 - protein, 58 aa, Artificial Sequence; identical to SEQ ID NO: 26725
  Synthetic

SEQ ID NO: 26735 - protein, 58 aa, Artificial Sequence; identical to SEQ ID NO: 26720
  Synthetic

SEQ ID NO: 26736 - protein, 58 aa, Artificial Sequence; identical to SEQ ID NO: 26725
  Synthetic

SEQ ID NO: 26737 - protein, 58 aa, Artificial Sequence
  Synthetic
SERETVKRRLEELLKEVKRTLDKLKEEHDRLLEDVRRVVEELKREHDKLLKEVKDSGV

SEQ ID NO: 26738 - protein, 58 aa, Artificial Sequence; identical to SEQ ID NO: 26720
  Synthetic

SEQ ID NO: 26739 - protein, 58 aa, Artificial Sequence; identical to SEQ ID NO: 26725
  Synthetic

SEQ ID NO: 26740 - protein, 58 aa, Artificial Sequence
  Synthetic
KEREEVKEKLDRLLEEVEKTVRELKREHDELLKEVEKLVRDLKKEHDELLKKVKDDGV

SEQ ID NO: 26741 - protein, 58 aa, Artificial Sequence
  Synthetic
SREEVLRELEEVIEDNRRLLEELIEKSKKVLDESLKLIDELLRRLEEVLERVLRLLEE

SEQ ID NO: 26742 - protein, 56 aa, Artificial Sequence; identical to SEQ ID NO: 16914
  Synthetic

SEQ ID NO: 26743 - protein, 57 aa, Artificial Sequence
  Synthetic
SEDSVERIARELERNLDDLARVLKESEDDLAEILRRLKEVLEESERDLERVEREVRK

SEQ ID NO: 26744 - protein, 56 aa, Artificial Sequence; identical to SEQ ID NO: 25244
  Synthetic

SEQ ID NO: 26745 - protein, 57 aa, Artificial Sequence
  Synthetic
SKEKIDRIIRELERILEEAKKKHEDVLRRLEDSLRRVAELLKAALDRLREIVDRLRR

SEQ ID NO: 26746 - protein, 56 aa, Artificial Sequence; identical to SEQ ID NO: 16914
  Synthetic

SEQ ID NO: 26747 - protein, 57 aa, Artificial Sequence
  Synthetic
DIKTLLDRVRKLAEEDAERLDRLRRESEELNERVRRVDKKLLEEIRRKAKKVEDDTR

SEQ ID NO: 26748 - protein, 57 aa, Artificial Sequence
  Synthetic
DAETLLRELEKLSRDNKELLKKIEKEIRDLIKEDKERNIELSERLRKLVEELKKKAT

SEQ ID NO: 26749 - protein, 56 aa, Artificial Sequence; identical to SEQ ID NO: 16914
  Synthetic

SEQ ID NO: 26750 - protein, 57 aa, Artificial Sequence; identical to SEQ ID NO: 26747
  Synthetic

SEQ ID NO: 26751 - protein, 56 aa, Artificial Sequence
  Synthetic
SEELSAEVKKLLDEVRKALARHKDENDKLLKEIEDSLRRHKEENDRLLEKLKESTR

SEQ ID NO: 26752 - protein, 57 aa, Artificial Sequence
  Synthetic
DADDVLARVEELAKRAHDENERLIREVEELVRAHNKRNKELVDEVKRLVEKVIEEER

SEQ ID NO: 26753 - protein, 57 aa, Artificial Sequence; identical to SEQ ID NO: 26745
  Synthetic

SEQ ID NO: 26754 - protein, 56 aa, Artificial Sequence; identical to SEQ ID NO: 16914
  Synthetic

SEQ ID NO: 26755 - protein, 56 aa, Artificial Sequence; identical to SEQ ID NO: 26751
  Synthetic

SEQ ID NO: 26756 - protein, 57 aa, Artificial Sequence
  Synthetic
DAETVLRSAEDIVAKNRKLAEEVLRRVKKIVEENRKIASEVLDDVRKLVEDVLARAS

SEQ ID NO: 26757 - protein, 57 aa, Artificial Sequence; identical to SEQ ID NO: 26752
  Synthetic

SEQ ID NO: 26758 - protein, 57 aa, Artificial Sequence; identical to SEQ ID NO: 26745
  Synthetic

SEQ ID NO: 26759 - protein, 57 aa, Artificial Sequence
  Synthetic
DEEKLKDLIRKLRDILRRAAEAHKKLIDDARESLERAKREHEKLIDRLKKILEELER

SEQ ID NO: 26760 - protein, 57 aa, Artificial Sequence; identical to SEQ ID NO: 26747
  Synthetic

SEQ ID NO: 26761 - protein, 57 aa, Artificial Sequence
  Synthetic
DATRVIEEAKRILDEARKLNEETIRRSEELVRRIERVIEEIIKRSEKLLEDVARESK

SEQ ID NO: 26762 - protein, 56 aa, Artificial Sequence; identical to SEQ ID NO: 26751
  Synthetic

SEQ ID NO: 26763 - protein, 57 aa, Artificial Sequence; identical to SEQ ID NO: 26756
  Synthetic

SEQ ID NO: 26764 - protein, 57 aa, Artificial Sequence; identical to SEQ ID NO: 26752
  Synthetic

SEQ ID NO: 26765 - protein, 56 aa, Artificial Sequence; identical to SEQ ID NO: 25244
  Synthetic

SEQ ID NO: 26766 - protein, 56 aa, Artificial Sequence
  Synthetic
DEEVLKKLAEIVRRVKEENRKVNEEVEKRLRELEEENKKVIEDLKSTVEELVERLR

SEQ ID NO: 26767 - protein, 56 aa, Artificial Sequence; identical to SEQ ID NO: 26766
  Synthetic

SEQ ID NO: 26768 - protein, 55 aa, Artificial Sequence
  Synthetic
DKLLKEARDLIREIEKRLEELLKRVEKLTEDAKRDLERSNREHKELADRIKETAR

SEQ ID NO: 26769 - protein, 56 aa, Artificial Sequence
  Synthetic
DKDSARELERIVKENAELAERVFREVEKIVRENTKLAEDSVRELKRLVEELKKRAK

SEQ ID NO: 26770 - protein, 57 aa, Artificial Sequence; identical to SEQ ID NO: 26745
  Synthetic

SEQ ID NO: 26771 - protein, 57 aa, Artificial Sequence; identical to SEQ ID NO: 26759
  Synthetic

SEQ ID NO: 26772 - protein, 56 aa, Artificial Sequence; identical to SEQ ID NO: 16914
  Synthetic

SEQ ID NO: 26773 - protein, 57 aa, Artificial Sequence
  Synthetic
DEEVLRTLEEIIRRLTKELEDVLREYERELRRLEEENKRVIDKTEEEIRRLADRLRR

SEQ ID NO: 26774 - protein, 57 aa, Artificial Sequence
  Synthetic
DERILRELEERVKELEKEAREILKRSEDETDKLREKAERILEDLERANRRTMDEARR

SEQ ID NO: 26775 - protein, 56 aa, Artificial Sequence; identical to SEQ ID NO: 26751
  Synthetic

SEQ ID NO: 26776 - protein, 58 aa, Artificial Sequence
  Synthetic
LPEEVLRELEELLKESEERIKRIEEEIKKIIDKSREDIKRVLEEIERLNAKAADDLRK

SEQ ID NO: 26777 - protein, 57 aa, Artificial Sequence; identical to SEQ ID NO: 26752
  Synthetic

SEQ ID NO: 26778 - protein, 56 aa, Artificial Sequence; identical to SEQ ID NO: 26766
  Synthetic

SEQ ID NO: 26779 - protein, 55 aa, Artificial Sequence; identical to SEQ ID NO: 26768
  Synthetic

SEQ ID NO: 26780 - protein, 57 aa, Artificial Sequence; identical to SEQ ID NO: 26773
  Synthetic

SEQ ID NO: 26781 - protein, 56 aa, Artificial Sequence
  Synthetic
DRRIEKVLKEIEEKIREVIKEWERVHREVEELLKRLIDENRKVLDEIRKLLEEKSK

SEQ ID NO: 26782 - protein, 57 aa, Artificial Sequence; identical to SEQ ID NO: 26774
  Synthetic

SEQ ID NO: 26783 - protein, 56 aa, Artificial Sequence; identical to SEQ ID NO: 26751
  Synthetic

SEQ ID NO: 26784 - protein, 56 aa, Artificial Sequence; identical to SEQ ID NO: 26766
  Synthetic

SEQ ID NO: 26785 - protein, 57 aa, Artificial Sequence; identical to SEQ ID NO: 26745
  Synthetic

SEQ ID NO: 26786 - protein, 56 aa, Artificial Sequence; identical to SEQ ID NO: 26781
  Synthetic

SEQ ID NO: 26787 - protein, 57 aa, Artificial Sequence
  Synthetic
TLRELARSIRKLSAENKERLKELLRELKKLSDENKERIKKLLSDAEKIIEDVARRAK

SEQ ID NO: 26788 - protein, 57 aa, Artificial Sequence; identical to SEQ ID NO: 26774
  Synthetic

SEQ ID NO: 26789 - protein, 58 aa, Artificial Sequence
  Synthetic
EKLKELRDVIAEVAKRIDELDEYTRESIRRAKKEIERLNRETKKVIEEVVKRIEEERK

SEQ ID NO: 26790 - protein, 56 aa, Artificial Sequence
  Synthetic
DERVREELKKLLTRVEEEHRKVLETDKKILKEAHKESKEVNDRDRELLERLEESVR

SEQ ID NO: 26791 - protein, 57 aa, Artificial Sequence; identical to SEQ ID NO: 26752
  Synthetic

SEQ ID NO: 26792 - protein, 57 aa, Artificial Sequence
  Synthetic
TVKRLLDELRELLERLKRTIEELLKRNRDLLADAEEKARRLLEENRKLLKAARDTAT

SEQ ID NO: 26793 - protein, 56 aa, Artificial Sequence; identical to SEQ ID NO: 26766
  Synthetic

SEQ ID NO: 26794 - protein, 57 aa, Artificial Sequence; identical to SEQ ID NO: 26745
  Synthetic

SEQ ID NO: 26795 - protein, 57 aa, Artificial Sequence; identical to SEQ ID NO: 26774
  Synthetic

SEQ ID NO: 26796 - protein, 57 aa, Artificial Sequence; identical to SEQ ID NO: 26761
  Synthetic

SEQ ID NO: 26797 - protein, 58 aa, Artificial Sequence
  Synthetic
EAAREIIKRLREVNKRTKEKLDELIKHSEEVLERVKRLIDELRKHSEEVLEDLRRRAK

SEQ ID NO: 26798 - protein, 58 aa, Artificial Sequence; identical to SEQ ID NO: 26789
  Synthetic

SEQ ID NO: 26799 - protein, 58 aa, Artificial Sequence
  Synthetic
ELLRRIKKLLDEIKKAIEDSSREIKRLLEESERVMKRSSEDIKRTLDDTRRVVEEVRR

SEQ ID NO: 26800 - protein, 55 aa, Artificial Sequence
  Synthetic
SKAIKDVRDIVKKVKDELKEWRDRNKELVDRLSEELKEWLKDVERVLKELTDKDR

SEQ ID NO: 26801 - protein, 56 aa, Artificial Sequence; identical to SEQ ID NO: 26790
  Synthetic

SEQ ID NO: 26802 - protein, 57 aa, Artificial Sequence
  Synthetic
DIDKLLKELRDLVEKIKKDLKELLERYEEIVRRIKELLKDLNREAEEVVRRLKEELR

SEQ ID NO: 26803 - protein, 57 aa, Artificial Sequence; identical to SEQ ID NO: 26752
  Synthetic

SEQ ID NO: 26804 - protein, 56 aa, Artificial Sequence; identical to SEQ ID NO: 26766
  Synthetic

SEQ ID NO: 26805 - protein, 58 aa, Artificial Sequence
  Synthetic
EREEELKEVADRVKEKLDRLNRENEKSSEELKRELDKINDENRETSERLKREIDETTR

SEQ ID NO: 26806 - protein, 57 aa, Artificial Sequence; identical to SEQ ID NO: 26745
  Synthetic

SEQ ID NO: 26807 - protein, 57 aa, Artificial Sequence; identical to SEQ ID NO: 26745
  Synthetic

SEQ ID NO: 26808 - protein, 57 aa, Artificial Sequence
  Synthetic
TKDLLDENSKRSNEISREVKKDLERTVRENKKIVDEVAKALEDTVDKNRRIVEEVTT

SEQ ID NO: 26809 - protein, 56 aa, Artificial Sequence; identical to SEQ ID NO: 16914
  Synthetic

SEQ ID NO: 26810 - protein, 56 aa, Artificial Sequence; identical to SEQ ID NO: 26781
  Synthetic

SEQ ID NO: 26811 - protein, 58 aa, Artificial Sequence; identical to SEQ ID NO: 26799
  Synthetic

SEQ ID NO: 26812 - protein, 56 aa, Artificial Sequence; identical to SEQ ID NO: 26751
  Synthetic

SEQ ID NO: 26813 - protein, 57 aa, Artificial Sequence; identical to SEQ ID NO: 26802
  Synthetic

SEQ ID NO: 26814 - protein, 57 aa, Artificial Sequence; identical to SEQ ID NO: 26752
  Synthetic

SEQ ID NO: 26815 - protein, 56 aa, Artificial Sequence; identical to SEQ ID NO: 26766
  Synthetic

SEQ ID NO: 26816 - protein, 56 aa, Artificial Sequence; identical to SEQ ID NO: 26766
  Synthetic

SEQ ID NO: 26817 - protein, 57 aa, Artificial Sequence; identical to SEQ ID NO: 26745
  Synthetic

SEQ ID NO: 26818 - protein, 56 aa, Artificial Sequence
  Synthetic
SEELREELKKLERKIEKVAKEIHDHDKEVTERLEDLLRRITEHARKSDREIEETAR

SEQ ID NO: 26819 - protein, 56 aa, Artificial Sequence; identical to SEQ ID NO: 26781
  Synthetic

SEQ ID NO: 26820 - protein, 57 aa, Artificial Sequence; identical to SEQ ID NO: 26761
  Synthetic

SEQ ID NO: 26821 - protein, 58 aa, Artificial Sequence; identical to SEQ ID NO: 26789
  Synthetic

SEQ ID NO: 26822 - protein, 58 aa, Artificial Sequence; identical to SEQ ID NO: 26799
  Synthetic

SEQ ID NO: 26823 - protein, 57 aa, Artificial Sequence; identical to SEQ ID NO: 26802
  Synthetic

SEQ ID NO: 26824 - protein, 58 aa, Artificial Sequence
  Synthetic
EAKKKLDEVLERAKRTIDRLLETSDRSLEKVEADLRRLNEELDRSLERAERTIRELAK

SEQ ID NO: 26825 - protein, 56 aa, Artificial Sequence; identical to SEQ ID NO: 26766
  Synthetic

SEQ ID NO: 26826 - protein, 56 aa, Artificial Sequence; identical to SEQ ID NO: 26766
  Synthetic

SEQ ID NO: 26827 - protein, 56 aa, Artificial Sequence; identical to SEQ ID NO: 26781
  Synthetic

SEQ ID NO: 26828 - protein, 57 aa, Artificial Sequence; identical to SEQ ID NO: 26774
  Synthetic

SEQ ID NO: 26829 - protein, 57 aa, Artificial Sequence
  Synthetic
DLKRVEERAREVSRRNEESMRRVKEDADRVSEANKEVLDRVREEVKRLIEEVRETLR

SEQ ID NO: 26830 - protein, 58 aa, Artificial Sequence; identical to SEQ ID NO: 26789
  Synthetic

SEQ ID NO: 26831 - protein, 58 aa, Artificial Sequence; identical to SEQ ID NO: 26799
  Synthetic

SEQ ID NO: 26832 - protein, 58 aa, Artificial Sequence; identical to SEQ ID NO: 26799
  Synthetic

SEQ ID NO: 26833 - protein, 58 aa, Artificial Sequence; identical to SEQ ID NO: 26776
  Synthetic

SEQ ID NO: 26834 - protein, 58 aa, Artificial Sequence; identical to SEQ ID NO: 26824
  Synthetic

SEQ ID NO: 26835 - protein, 56 aa, Artificial Sequence; identical to SEQ ID NO: 26766
  Synthetic

SEQ ID NO: 26836 - protein, 55 aa, Artificial Sequence; identical to SEQ ID NO: 26768
  Synthetic

SEQ ID NO: 26837 - protein, 55 aa, Artificial Sequence; identical to SEQ ID NO: 26768
  Synthetic

SEQ ID NO: 26838 - protein, 58 aa, Artificial Sequence
  Synthetic
DIVRKIERIVETIEREVRESVKKVEEIARDIRRKVDESVKNVEKLLRDVDKKARDRKK

SEQ ID NO: 26839 - protein, 55 aa, Artificial Sequence
  Synthetic
DEIKRIVDEVRERLKRIVDENAKIVEDARRALEKIVKENEEILRRLKKELRELRK

SEQ ID NO: 26840 - protein, 56 aa, Artificial Sequence; identical to SEQ ID NO: 26781
  Synthetic

SEQ ID NO: 26841 - protein, 57 aa, Artificial Sequence; identical to SEQ ID NO: 26829
  Synthetic

SEQ ID NO: 26842 - protein, 57 aa, Artificial Sequence; identical to SEQ ID NO: 26761
  Synthetic

SEQ ID NO: 26843 - protein, 57 aa, Artificial Sequence
  Synthetic
DAETIERVVRELLEENKEVLRKTEEAVKRSTETNKRLLEASKEVADRLRERIKEAAK

SEQ ID NO: 26844 - protein, 58 aa, Artificial Sequence; identical to SEQ ID NO: 26789
  Synthetic

SEQ ID NO: 26845 - protein, 58 aa, Artificial Sequence; identical to SEQ ID NO: 26799
  Synthetic

SEQ ID NO: 26846 - protein, 55 aa, Artificial Sequence
  Synthetic
DEVVERAERISEENKRRVEDVARKSKELVEDVRRHSEEVVRRVEELVKEVEERVR

SEQ ID NO: 26847 - protein, 58 aa, Artificial Sequence; identical to SEQ ID NO: 26824
  Synthetic

SEQ ID NO: 26848 - protein, 57 aa, Artificial Sequence
  Synthetic
TAERARETLKRLLDENRDRSKKVKEEIRRILEDLTRTTERVKREIAKLLKELEDTAR

SEQ ID NO: 26849 - protein, 58 aa, Artificial Sequence; identical to SEQ ID NO: 25262
  Synthetic

SEQ ID NO: 26850 - protein, 57 aa, Artificial Sequence; identical to SEQ ID NO: 26774
  Synthetic

SEQ ID NO: 26851 - protein, 57 aa, Artificial Sequence; identical to SEQ ID NO: 26761
  Synthetic

SEQ ID NO: 26852 - protein, 58 aa, Artificial Sequence
  Synthetic
DKARKVAEVAEKVLRDIDKLDRESKEAFRATNEEIAKLDEDTARVAERVKKAIEDLAK

SEQ ID NO: 26853 - protein, 58 aa, Artificial Sequence; identical to SEQ ID NO: 26789
  Synthetic

SEQ ID NO: 26854 - protein, 58 aa, Artificial Sequence; identical to SEQ ID NO: 26799
  Synthetic

SEQ ID NO: 26855 - protein, 58 aa, Artificial Sequence
  Synthetic
DKVERVVREVEKLHEEDRKRLEESTRSVRKLLEELKRELEKSTRSVKALVDELRERVR

SEQ ID NO: 26856 - protein, 55 aa, Artificial Sequence; identical to SEQ ID NO: 26846
  Synthetic

SEQ ID NO: 26857 - protein, 58 aa, Artificial Sequence; identical to SEQ ID NO: 26824
  Synthetic

SEQ ID NO: 26858 - protein, 57 aa, Artificial Sequence; identical to SEQ ID NO: 26848
  Synthetic

SEQ ID NO: 26859 - protein, 57 aa, Artificial Sequence; identical to SEQ ID NO: 26774
  Synthetic

SEQ ID NO: 26860 - protein, 57 aa, Artificial Sequence; identical to SEQ ID NO: 26774
  Synthetic

SEQ ID NO: 26861 - protein, 57 aa, Artificial Sequence; identical to SEQ ID NO: 26829
  Synthetic

SEQ ID NO: 26862 - protein, 58 aa, Artificial Sequence; identical to SEQ ID NO: 26852
  Synthetic

SEQ ID NO: 26863 - protein, 58 aa, Artificial Sequence; identical to SEQ ID NO: 26799
  Synthetic

SEQ ID NO: 26864 - protein, 55 aa, Artificial Sequence; identical to SEQ ID NO: 26800
  Synthetic

SEQ ID NO: 26865 - protein, 58 aa, Artificial Sequence; identical to SEQ ID NO: 26855
  Synthetic

SEQ ID NO: 26866 - protein, 57 aa, Artificial Sequence; identical to SEQ ID NO: 26802
  Synthetic

SEQ ID NO: 26867 - protein, 58 aa, Artificial Sequence; identical to SEQ ID NO: 26824
  Synthetic

SEQ ID NO: 26868 - protein, 55 aa, Artificial Sequence; identical to SEQ ID NO: 26768
  Synthetic

SEQ ID NO: 26869 - protein, 57 aa, Artificial Sequence; identical to SEQ ID NO: 26848
  Synthetic

SEQ ID NO: 26870 - protein, 55 aa, Artificial Sequence; identical to SEQ ID NO: 26839
  Synthetic

SEQ ID NO: 26871 - protein, 55 aa, Artificial Sequence
  Synthetic
DRIEEELKRLIDTLREKNREVEKRARDSNRDLKRTNDEIAKEVRELIKKLREDLK

SEQ ID NO: 26872 - protein, 57 aa, Artificial Sequence; identical to SEQ ID NO: 26774
  Synthetic

SEQ ID NO: 26873 - protein, 57 aa, Artificial Sequence; identical to SEQ ID NO: 26843
  Synthetic

SEQ ID NO: 26874 - protein, 58 aa, Artificial Sequence; identical to SEQ ID NO: 26852
  Synthetic

SEQ ID NO: 26875 - protein, 58 aa, Artificial Sequence; identical to SEQ ID NO: 26855
  Synthetic

SEQ ID NO: 26876 - protein, 57 aa, Artificial Sequence
  Synthetic
DIERILRELEAVLKKLTDESERLNREVERVSRDTKKKSKELNEELKAVLDEVKRKAD

SEQ ID NO: 26877 - protein, 55 aa, Artificial Sequence; identical to SEQ ID NO: 26846
  Synthetic

SEQ ID NO: 26878 - protein, 58 aa, Artificial Sequence; identical to SEQ ID NO: 26824
  Synthetic

SEQ ID NO: 26879 - protein, 57 aa, Artificial Sequence; identical to SEQ ID NO: 26848
  Synthetic

SEQ ID NO: 26880 - protein, 55 aa, Artificial Sequence; identical to SEQ ID NO: 26839
  Synthetic

SEQ ID NO: 26881 - protein, 56 aa, Artificial Sequence; identical to SEQ ID NO: 26781
  Synthetic

SEQ ID NO: 26882 - protein, 57 aa, Artificial Sequence; identical to SEQ ID NO: 26829
  Synthetic

SEQ ID NO: 26883 - protein, 57 aa, Artificial Sequence; identical to SEQ ID NO: 26843
  Synthetic

SEQ ID NO: 26884 - protein, 58 aa, Artificial Sequence; identical to SEQ ID NO: 26852
  Synthetic

SEQ ID NO: 26885 - protein, 58 aa, Artificial Sequence; identical to SEQ ID NO: 26799
  Synthetic

SEQ ID NO: 26886 - protein, 58 aa, Artificial Sequence; identical to SEQ ID NO: 26855
  Synthetic

SEQ ID NO: 26887 - protein, 58 aa, Artificial Sequence; identical to SEQ ID NO: 26824
  Synthetic

SEQ ID NO: 26888 - protein, 57 aa, Artificial Sequence; identical to SEQ ID NO: 26848
  Synthetic

SEQ ID NO: 26889 - protein, 55 aa, Artificial Sequence; identical to SEQ ID NO: 26839
  Synthetic

SEQ ID NO: 26890 - protein, 58 aa, Artificial Sequence; identical to SEQ ID NO: 26852
  Synthetic

SEQ ID NO: 26891 - protein, 58 aa, Artificial Sequence
  Synthetic
DEVTKVKKVADDVLAEIKKLDDETRRVIEDTNKKIADLDKATRDVVRKVLEEVKKLEK

SEQ ID NO: 26892 - protein, 57 aa, Artificial Sequence; identical to SEQ ID NO: 26802
  Synthetic

SEQ ID NO: 26893 - protein, 57 aa, Artificial Sequence; identical to SEQ ID NO: 26848
  Synthetic

SEQ ID NO: 26894 - protein, 55 aa, Artificial Sequence; identical to SEQ ID NO: 26839
  Synthetic

SEQ ID NO: 26895 - protein, 58 aa, Artificial Sequence
  Synthetic
RLVREVEDLVRRLVRRSEKSNEEVKRTVEELVRRMEESNDRVRDLVRRLVEELKRAVD

SEQ ID NO: 26896 - protein, 58 aa, Artificial Sequence; identical to SEQ ID NO: 26852
  Synthetic

SEQ ID NO: 26897 - protein, 58 aa, Artificial Sequence; identical to SEQ ID NO: 26824
  Synthetic

SEQ ID NO: 26898 - protein, 58 aa, Artificial Sequence; identical to SEQ ID NO: 26895
  Synthetic

SEQ ID NO: 26899 - protein, 58 aa, Artificial Sequence; identical to SEQ ID NO: 26852
  Synthetic

SEQ ID NO: 26900 - protein, 58 aa, Artificial Sequence; identical to SEQ ID NO: 26891
  Synthetic

SEQ ID NO: 26901 - protein, 57 aa, Artificial Sequence; identical to SEQ ID NO: 26848
  Synthetic

SEQ ID NO: 26902 - protein, 57 aa, Artificial Sequence; identical to SEQ ID NO: 26829
  Synthetic

SEQ ID NO: 26903 - protein, 58 aa, Artificial Sequence; identical to SEQ ID NO: 26852
  Synthetic

SEQ ID NO: 26904 - protein, 58 aa, Artificial Sequence; identical to SEQ ID NO: 26891
  Synthetic

SEQ ID NO: 26905 - protein, 58 aa, Artificial Sequence; identical to SEQ ID NO: 26855
  Synthetic

SEQ ID NO: 26906 - protein, 58 aa, Artificial Sequence; identical to SEQ ID NO: 26824
  Synthetic

SEQ ID NO: 26907 - protein, 57 aa, Artificial Sequence; identical to SEQ ID NO: 26848
  Synthetic

SEQ ID NO: 26908 - protein, 57 aa, Artificial Sequence; identical to SEQ ID NO: 26848
  Synthetic

SEQ ID NO: 26909 - protein, 58 aa, Artificial Sequence; identical to SEQ ID NO: 26852
  Synthetic

SEQ ID NO: 26910 - protein, 58 aa, Artificial Sequence; identical to SEQ ID NO: 26891
  Synthetic

SEQ ID NO: 26911 - protein, 58 aa, Artificial Sequence; identical to SEQ ID NO: 26855
  Synthetic

SEQ ID NO: 26912 - protein, 57 aa, Artificial Sequence; identical to SEQ ID NO: 26848
  Synthetic

SEQ ID NO: 26913 - protein, 58 aa, Artificial Sequence; identical to SEQ ID NO: 26852
  Synthetic

SEQ ID NO: 26914 - protein, 58 aa, Artificial Sequence; identical to SEQ ID NO: 26895
  Synthetic

SEQ ID NO: 26915 - protein, 58 aa, Artificial Sequence
  Synthetic
SESDEVIRDLARLLDELARHVDDSVRRMDEVVKRSTREADELAKRLDELVKEVEKKPG

SEQ ID NO: 26916 - protein, 58 aa, Artificial Sequence
  Synthetic
SRAETVLKEVTDKIKKLADSSDELLRRNKENIDELKKSSEELLRRLTKAIEEIEKGSV

SEQ ID NO: 26917 - protein, 58 aa, Artificial Sequence
  Synthetic
SVDEVLKEIEDALRRLKEEVERVLKENEDELRRLEEEVRRVLKEDEELLESLKRGVGE

SEQ ID NO: 26918 - protein, 58 aa, Artificial Sequence
  Synthetic
SEVDEIIKELERLLAEIARENERIIRESRKLADEVRKRNEDAIRKLEELVARLADAVR

SEQ ID NO: 26919 - protein, 58 aa, Artificial Sequence
  Synthetic
SEVDDVLRRLEELIKTLEDINAKSLEDIKKLIDDLAKILEDALRKHEKLIRELREAKK

SEQ ID NO: 26920 - protein, 58 aa, Artificial Sequence; identical to SEQ ID NO: 26919
  Synthetic

SEQ ID NO: 26921 - protein, 58 aa, Artificial Sequence; identical to SEQ ID NO: 26916
  Synthetic

SEQ ID NO: 26922 - protein, 58 aa, Artificial Sequence
  Synthetic
KEVEDAVKELEDLLRANEDKTRSIVEDMRASNKDLEDHSRASEEEVRKLLDDLRRAGV

SEQ ID NO: 26923 - protein, 58 aa, Artificial Sequence; identical to SEQ ID NO: 26919
  Synthetic

SEQ ID NO: 26924 - protein, 58 aa, Artificial Sequence; identical to SEQ ID NO: 26915
  Synthetic

SEQ ID NO: 26925 - protein, 58 aa, Artificial Sequence
  Synthetic
SESDDVIRKLRELLEELRTHVEKSIRDLRKILEDSTRHAKRSIEELERLLEEVRKKPG

SEQ ID NO: 26926 - protein, 58 aa, Artificial Sequence; identical to SEQ ID NO: 26916
  Synthetic

SEQ ID NO: 26927 - protein, 58 aa, Artificial Sequence
  Synthetic
SEAEKAKETIDRLADRVRKLLEEIKRSLDDSRRKSKETVEENEKTLDRMRKEVDAAKR

SEQ ID NO: 26928 - protein, 58 aa, Artificial Sequence; identical to SEQ ID NO: 26927
  Synthetic

SEQ ID NO: 26929 - protein, 58 aa, Artificial Sequence
  Synthetic
SEVEELIKRLAKVLKELVDKVRKVIEDTKELLERLKRRSEDHIRKLREVLKEAKDQPI

SEQ ID NO: 26930 - protein, 58 aa, Artificial Sequence
  Synthetic
SELEEIEKKVRELTKRHRELVERVRKTVKELIETNRRLLETLTERIKRVLEEVRDLER

SEQ ID NO: 26931 - protein, 58 aa, Artificial Sequence
  Synthetic
SSEERLRAVIEDLKRLAEESRKRHKELIDELAKAVERIERRHKKLLDEIKAVVDDIRR

SEQ ID NO: 26932 - protein, 58 aa, Artificial Sequence
  Synthetic
DEIRKVVKEITDLLKASNDKNRKVVEEIRDLLRKSKKLADELVERLRALVEDLRRRID

SEQ ID NO: 26933 - protein, 58 aa, Artificial Sequence
  Synthetic
STAETVAEEVERVLKHSDDLIKEVEDVNRRVEEEIKRVIRELEEENERLVAEVRKGVK

SEQ ID NO: 26934 - protein, 58 aa, Artificial Sequence; identical to SEQ ID NO: 26918
  Synthetic

SEQ ID NO: 26935 - protein, 58 aa, Artificial Sequence
  Synthetic
SEIDEVLTRLRKISKDLNETSDRVNERARKIIDDIKKESKRVNDEAREIVERLKREID

SEQ ID NO: 26936 - protein, 58 aa, Artificial Sequence
  Synthetic
SEDEDLDRVAEKLAREHKKSVEEIKRVLKSADEESKKLVRDTERVIEEIKREVEEARR

SEQ ID NO: 26937 - protein, 58 aa, Artificial Sequence
  Synthetic
SSVEELLERLRRISEENKRRIEKLLREVEKVLRELKDRHRKLLKRVEEIIRKVKEEIK

SEQ ID NO: 26938 - protein, 58 aa, Artificial Sequence; identical to SEQ ID NO: 25117
  Synthetic

SEQ ID NO: 26939 - protein, 58 aa, Artificial Sequence; identical to SEQ ID NO: 26915
  Synthetic

SEQ ID NO: 26940 - protein, 58 aa, Artificial Sequence; identical to SEQ ID NO: 26922
  Synthetic

SEQ ID NO: 26941 - protein, 58 aa, Artificial Sequence; identical to SEQ ID NO: 26932
  Synthetic

SEQ ID NO: 26942 - protein, 58 aa, Artificial Sequence
  Synthetic
SRVEEIIEDLRRLLEEIRKENEDSIRRSKELLDRVKEINDTIIAELERLLKDIEKEVR

SEQ ID NO: 26943 - protein, 58 aa, Artificial Sequence; identical to SEQ ID NO: 26942
  Synthetic

SEQ ID NO: 26944 - protein, 58 aa, Artificial Sequence; identical to SEQ ID NO: 26919
  Synthetic

SEQ ID NO: 26945 - protein, 58 aa, Artificial Sequence
  Synthetic
SKLEEVEKAVRKVIEDSRRVNEEVNRRSEEVVRELEKVHREVNDASRRVVEKARRVLK

SEQ ID NO: 26946 - protein, 58 aa, Artificial Sequence; identical to SEQ ID NO: 26915
  Synthetic

SEQ ID NO: 26947 - protein, 58 aa, Artificial Sequence; identical to SEQ ID NO: 26915
  Synthetic

SEQ ID NO: 26948 - protein, 58 aa, Artificial Sequence; identical to SEQ ID NO: 26925
  Synthetic

SEQ ID NO: 26949 - protein, 58 aa, Artificial Sequence
  Synthetic
DEVRELLERNRRLLEEIKKTVKDLIRANEELLKRIEDDAKRLIDRNEELLDELEKGLS

SEQ ID NO: 26950 - protein, 58 aa, Artificial Sequence; identical to SEQ ID NO: 26932
  Synthetic

SEQ ID NO: 26951 - protein, 58 aa, Artificial Sequence; identical to SEQ ID NO: 26916
  Synthetic

SEQ ID NO: 26952 - protein, 58 aa, Artificial Sequence
  Synthetic
DEEEDLERAIKKLLDENRELLKRIAEELRRLLEELRRLTEESADRLRRLLKELKDRGV

SEQ ID NO: 26953 - protein, 58 aa, Artificial Sequence; identical to SEQ ID NO: 26932
  Synthetic

SEQ ID NO: 26954 - protein, 58 aa, Artificial Sequence
  Synthetic
SKEDRLREELKKLLARLAEEIERLKRALEESNKDLKRTIDASEKHLRDVNEDVKRGGV

SEQ ID NO: 26955 - protein, 58 aa, Artificial Sequence; identical to SEQ ID NO: 26915
  Synthetic

SEQ ID NO: 26956 - protein, 58 aa, Artificial Sequence; identical to SEQ ID NO: 26915
  Synthetic

SEQ ID NO: 26957 - protein, 58 aa, Artificial Sequence; identical to SEQ ID NO: 26925
  Synthetic

SEQ ID NO: 26958 - protein, 58 aa, Artificial Sequence; identical to SEQ ID NO: 26942
  Synthetic

SEQ ID NO: 26959 - protein, 58 aa, Artificial Sequence; identical to SEQ ID NO: 26918
  Synthetic

SEQ ID NO: 26960 - protein, 58 aa, Artificial Sequence; identical to SEQ ID NO: 26937
  Synthetic

SEQ ID NO: 26961 - protein, 58 aa, Artificial Sequence; identical to SEQ ID NO: 25261
  Synthetic

SEQ ID NO: 26962 - protein, 58 aa, Artificial Sequence; identical to SEQ ID NO: 26915
  Synthetic

SEQ ID NO: 26963 - protein, 58 aa, Artificial Sequence; identical to SEQ ID NO: 26925
  Synthetic

SEQ ID NO: 26964 - protein, 58 aa, Artificial Sequence; identical to SEQ ID NO: 26916
  Synthetic

SEQ ID NO: 26965 - protein, 58 aa, Artificial Sequence; identical to SEQ ID NO: 26949
  Synthetic

SEQ ID NO: 26966 - protein, 58 aa, Artificial Sequence
  Synthetic
STEEVLDEIRKLHKTLTEDIKRVLREIEELHRRTIEENKEVLDKIAEDYKRVIDDVRT

SEQ ID NO: 26967 - protein, 58 aa, Artificial Sequence
  Synthetic
SEIEKILKEIEDLARRDEEVSKKIVEDIRRLAKEVEDTSRDIVRKIEELAKRVLDRLR

SEQ ID NO: 26968 - protein, 58 aa, Artificial Sequence
  Synthetic
SEAERLEARARELLRANEELMDDLRAKAEELLKRNDRLVKEIEKKVREVLAAIEELKR

SEQ ID NO: 26969 - protein, 58 aa, Artificial Sequence
  Synthetic
DDLERAREEVADLIRKHEEKTRRILEESRRLNERHRELSARILDEIRKLAERIEELIK

SEQ ID NO: 26970 - protein, 58 aa, Artificial Sequence; identical to SEQ ID NO: 26952
  Synthetic

SEQ ID NO: 26971 - protein, 58 aa, Artificial Sequence; identical to SEQ ID NO: 26932
  Synthetic

SEQ ID NO: 26972 - protein, 58 aa, Artificial Sequence; identical to SEQ ID NO: 26932
  Synthetic

SEQ ID NO: 26973 - protein, 58 aa, Artificial Sequence
  Synthetic
STAETVEKKVEEVIRENEKSMRESEEKVDRSTKRIEDVLRRLEETIRKTSDDIAKGVK

SEQ ID NO: 26974 - protein, 58 aa, Artificial Sequence; identical to SEQ ID NO: 26942
  Synthetic

SEQ ID NO: 26975 - protein, 58 aa, Artificial Sequence; identical to SEQ ID NO: 26942
  Synthetic

SEQ ID NO: 26976 - protein, 58 aa, Artificial Sequence
  Synthetic
REVEEMIKELEELLKDLKEKNERASKRNRELVRRLEEENKRVIEELKKLVKELEDLVR

SEQ ID NO: 26977 - protein, 58 aa, Artificial Sequence; identical to SEQ ID NO: 26919
  Synthetic

SEQ ID NO: 26978 - protein, 58 aa, Artificial Sequence; identical to SEQ ID NO: 26945
  Synthetic

SEQ ID NO: 26979 - protein, 58 aa, Artificial Sequence
  Synthetic
DEVEDVLRKIEKILDDHRKRIEKNSRDMARIIDEHRRKVEENSREMKKLVDDLKKAVD

SEQ ID NO: 26980 - protein, 58 aa, Artificial Sequence; identical to SEQ ID NO: 26937
  Synthetic

SEQ ID NO: 26981 - protein, 58 aa, Artificial Sequence
  Synthetic
DEVEKVLEEIKRALDDLRKKVEESKREIKEALKAVEKHTRDSDTANKRTLAEIERGVK

SEQ ID NO: 26982 - protein, 58 aa, Artificial Sequence; identical to SEQ ID NO: 26915
  Synthetic

SEQ ID NO: 26983 - protein, 58 aa, Artificial Sequence; identical to SEQ ID NO: 26922
  Synthetic

SEQ ID NO: 26984 - protein, 58 aa, Artificial Sequence; identical to SEQ ID NO: 26932
  Synthetic

SEQ ID NO: 26985 - protein, 58 aa, Artificial Sequence; identical to SEQ ID NO: 26933
  Synthetic

SEQ ID NO: 26986 - protein, 58 aa, Artificial Sequence; identical to SEQ ID NO: 26942
  Synthetic

SEQ ID NO: 26987 - protein, 58 aa, Artificial Sequence; identical to SEQ ID NO: 26918
  Synthetic

SEQ ID NO: 26988 - protein, 58 aa, Artificial Sequence; identical to SEQ ID NO: 26919
  Synthetic

SEQ ID NO: 26989 - protein, 58 aa, Artificial Sequence; identical to SEQ ID NO: 26945
  Synthetic

SEQ ID NO: 26990 - protein, 58 aa, Artificial Sequence
  Synthetic
SAEEVKEELKRIATKLKEEIKENIRRLEESVEKIAKELAENIKRLEDILRDVKRGLRD

SEQ ID NO: 26991 - protein, 58 aa, Artificial Sequence
  Synthetic
SDVDRVLEEIRKLLEDLKRHSEKVSEENEDLLRANTELNKRVSEDNERLLEELKRLRE

SEQ ID NO: 26992 - protein, 58 aa, Artificial Sequence; identical to SEQ ID NO: 26979
  Synthetic

SEQ ID NO: 26993 - protein, 58 aa, Artificial Sequence; identical to SEQ ID NO: 26937
  Synthetic

SEQ ID NO: 26994 - protein, 58 aa, Artificial Sequence
  Synthetic
DREREVKKRLDEVRERIERLLRRVEEESRRVAEEIRRLIEEVRRRNKKVTEEIRELLK

SEQ ID NO: 26995 - protein, 58 aa, Artificial Sequence; identical to SEQ ID NO: 26916
  Synthetic

SEQ ID NO: 26996 - protein, 58 aa, Artificial Sequence; identical to SEQ ID NO: 26967
  Synthetic

SEQ ID NO: 26997 - protein, 58 aa, Artificial Sequence; identical to SEQ ID NO: 26927
  Synthetic

SEQ ID NO: 26998 - protein, 58 aa, Artificial Sequence; identical to SEQ ID NO: 26929
  Synthetic

SEQ ID NO: 26999 - protein, 58 aa, Artificial Sequence; identical to SEQ ID NO: 26932
  Synthetic

SEQ ID NO: 27000 - protein, 58 aa, Artificial Sequence; identical to SEQ ID NO: 26932
  Synthetic

SEQ ID NO: 27001 - protein, 58 aa, Artificial Sequence; identical to SEQ ID NO: 26973
  Synthetic

SEQ ID NO: 27002 - protein, 58 aa, Artificial Sequence; identical to SEQ ID NO: 26942
  Synthetic

SEQ ID NO: 27003 - protein, 58 aa, Artificial Sequence; identical to SEQ ID NO: 26976
  Synthetic

SEQ ID NO: 27004 - protein, 58 aa, Artificial Sequence
  Synthetic
DAVEEAEKLIRKVIADSEKLLRDLADLNAKSIRRSEKLVEDDRRANEDVIRKLEELRR

SEQ ID NO: 27005 - protein, 58 aa, Artificial Sequence; identical to SEQ ID NO: 26919
  Synthetic

SEQ ID NO: 27006 - protein, 58 aa, Artificial Sequence
  Synthetic
SEIERVKKRLEELLAEVEESTRRLEERLKRLLEEAKRSSEEVEKELRRLLEAVRRGLS

SEQ ID NO: 27007 - protein, 58 aa, Artificial Sequence; identical to SEQ ID NO: 26991
  Synthetic

SEQ ID NO: 27008 - protein, 58 aa, Artificial Sequence; identical to SEQ ID NO: 26979
  Synthetic

SEQ ID NO: 27009 - protein, 58 aa, Artificial Sequence; identical to SEQ ID NO: 26915
  Synthetic

SEQ ID NO: 27010 - protein, 58 aa, Artificial Sequence; identical to SEQ ID NO: 26916
  Synthetic

SEQ ID NO: 27011 - protein, 58 aa, Artificial Sequence; identical to SEQ ID NO: 26952
  Synthetic

SEQ ID NO: 27012 - protein, 58 aa, Artificial Sequence; identical to SEQ ID NO: 26932
  Synthetic

SEQ ID NO: 27013 - protein, 58 aa, Artificial Sequence; identical to SEQ ID NO: 27004
  Synthetic

SEQ ID NO: 27014 - protein, 58 aa, Artificial Sequence; identical to SEQ ID NO: 26936
  Synthetic

SEQ ID NO: 27015 - protein, 58 aa, Artificial Sequence; identical to SEQ ID NO: 26954
  Synthetic

SEQ ID NO: 27016 - protein, 36 aa, Artificial Sequence
  Synthetic
DEARKAIARVKRESKRIVEDAERLIREAAAASEKIS

SEQ ID NO: 27017 - protein, 40 aa, Artificial Sequence
  Synthetic
  MISC_FEATURE (40)..(40): C-terminal biotin
DEARKAIARVKRESKRIVEDAERLIREAAAASEKISGSGK

SEQ ID NO: 27018 - protein, 447 aa, Artificial Sequence
  Synthetic
  MISC_FEATURE (1)..(3): optional
  MISC_FEATURE (43)..(447): optional
  MISC_FEATURE (434)..(434): optional residue for biotinylation of MBP_key
MDPDEARKAIARVKRESKRIVEDAERLIREAAAASEKISREASSGLVPRGSHMKIEEGKLVIWINGDKGYNGLAEVGKKFEKDTGIKVTVEHPDKLEEKFPQVAATGDGPDIIFWAHDRFGGYAQSGLLAEITPDKAFQDKLYPFTWDAVRYNGKLIAYPIAVEALSLIYNKDLLPNPPKTWEEIPALDKELKAKGKSALMFNLQEPYFTWPLIAADGGYAFKYENGKYDIKDVGVDNAGAKAGLTFLVDLIKNKHMNADTDYSIAEAAFNKGETAMTINGPWAWSNIDTSKVNYGVTVLPTFKGQPSKPFVGVLSAGINAASPNKELAKEFLENYLLTDEGLEAVNKDKPLGAVALKSYEEELVKDPRIAATMENAQKGEIMPNIPQMSAFWYAVRTAVINAASGRQTVDEALKDAQTNSSGSGLNDIFEAQKIEWHELEHHHHHH

SEQ ID NO: 27019 - protein, 455 aa, Artificial Sequence
  Synthetic
  MISC_FEATURE (1)..(3): optional
  MISC_FEATURE (51)..(455): optional
  MISC_FEATURE (442)..(442): optional residue for biotinylation of MBP_key
MDPDEARKAIARVKRESKRIVEDAERLIREAAAASEKISREAERLIREAASSGLVPRGSHMKIEEGKLVIWINGDKGYNGLAEVGKKFEKDTGIKVTVEHPDKLEEKFPQVAATGDGPDIIFWAHDRFGGYAQSGLLAEITPDKAFQDKLYPFTWDAVRYNGKLIAYPIAVEALSLIYNKDLLPNPPKTWEEIPALDKELKAKGKSALMFNLQEPYFTWPLIAADGGYAFKYENGKYDIKDVGVDNAGAKAGLTFLVDLIKNKHMNADTDYSIAEAAFNKGETAMTINGPWAWSNIDTSKVNYGVTVLPTFKGQPSKPFVGVLSAGINAASPNKELAKEFLENYLLTDEGLEAVNKDKPLGAVALKSYEEELVKDPRIAATMENAQKGEIMPNIPQMSAFWYAVRTAVINAASGRQTVDEALKDAQTNSSGSGLNDIFEAQKIEWHELEHHHHHH

SEQ ID NO: 27020 - protein, 464 aa, Artificial Sequence
  Synthetic
  MISC_FEATURE (1)..(3): optional
  MISC_FEATURE (60)..(464): optional
  MISC_FEATURE (451)..(451): optional residue for biotinylation of MBP_key
MDPDEARKAIARVKRESKRIVEDAERLIREAAAASEKISREAERLIREAAAASEKISRESSGLVPRGSHMKIEEGKLVIWINGDKGYNGLAEVGKKFEKDTGIKVTVEHPDKLEEKFPQVAATGDGPDIIFWAHDRFGGYAQSGLLAEITPDKAFQDKLYPFTWDAVRYNGKLIAYPIAVEALSLIYNKDLLPNPPKTWEEIPALDKELKAKGKSALMFNLQEPYFTWPLIAADGGYAFKYENGKYDIKDVGVDNAGAKAGLTFLVDLIKNKHMNADTDYSIAEAAFNKGETAMTINGPWAWSNIDTSKVNYGVTVLPTFKGQPSKPFVGVLSAGINAASPNKELAKEFLENYLLTDEGLEAVNKDKPLGAVALKSYEEELVKDPRIAATMENAQKGEIMPNIPQMSAFWYAVRTAVINAASGRQTVDEALKDAQTNSSGSGLNDIFEAQKIEWHELEHHHHHH

SEQ ID NO: 27021 - protein, 456 aa, Artificial Sequence
  Synthetic
  MISC_FEATURE (1)..(400)
  MISC_FEATURE (439)..(456)
MGSSHHHHHHSSGLVPRGSHMKIEEGKLVIWINGDKGYNGLAEVGKKFEKDTGIKVTVEHPDKLEEKFPQVAATGDGPDIIFWAHDRFGGYAQSGLLAEITPDKAFQDKLYPFTWDAVRYNGKLIAYPIAVEALSLIYNKDLLPNPPKTWEEIPALDKELKAKGKSALMFNLQEPYFTWPLIAADGGYAFKYENGKYDIKDVGVDNAGAKAGLTFLVDLIKNKHMNADTDYSIAEAAFNKGETAMTINGPWAWSNIDTSKVNYGVTVLPTFKGQPSKPFVGVLSAGINAASPNKELAKEFLENYLLTDEGLEAVNKDKPLGAVALKSYEEELVKDPRIAATMENAQKGEIMPNIPQMSAFWYAVRTAVINAASGRQTVDEALKDAQTNSGSGSGENLYFQDEARKAIARVKRESKRIVEDAERLIREAAAASEKISREAERLIREAAAASEKISRE

SEQ ID NO: 27022 - protein, 445 aa, Artificial Sequence
  Synthetic
  MISC_FEATURE (1)..(1): optional
  MISC_FEATURE (58)..(445): optional
MNKEEIEKLAKEAREKLKKAEKEHKEIHDKLRKKNKKAREDLKKKADELRETNKRVNGSENLYFQGSGSGKIEEGKLVIWINGDKGYNGLAEVGKKFEKDTGIKVTVEHPDKLEEKFPQVAATGDGPDIIFWAHDRFGGYAQSGLLAEITPDKAFQDKLYPFTWDAVRYNGKLIAYPIAVEALSLIYNKDLLPNPPKTWEEIPALDKELKAKGKSALMFNLQEPYFTWPLIAADGGYAFKYENGKYDIKDVGVDNAGAKAGLTFLVDLIKNKHMNADTDYSIAEAAFNKGETAMTINGPWAWSNIDTSKVNYGVTVLPTFKGQPSKPFVGVLSAGINAASPNKELAKEFLENYLLTDEGLEAVNKDKPLGAVALKSYEEELVKDPRIAATMENAQKGEIMPNIPQMSAFWYAVRTAVINAASGRQTVDEALKDAQTNLEHHHHHH

SEQ ID NO: 27023 - protein, 445 aa, Artificial Sequence
  Synthetic
  MISC_FEATURE (1)..(1): optional
  MISC_FEATURE (58)..(445): optional
MSSEKVRRELKESLKENHKQNQKLLKDHKRAQEKLNRELEELKKKHKKTLDDIRRESGSENLYFQGSGSGKIEEGKLVIWINGDKGYNGLAEVGKKFEKDTGIKVTVEHPDKLEEKFPQVAATGDGPDIIFWAHDRFGGYAQSGLLAEITPDKAFQDKLYPFTWDAVRYNGKLIAYPIAVEALSLIYNKDLLPNPPKTWEEIPALDKELKAKGKSALMFNLQEPYFTWPLIAADGGYAFKYENGKYDIKDVGVDNAGAKAGLTFLVDLIKNKHMNADTDYSIAEAAFNKGETAMTINGPWAWSNIDTSKVNYGVTVLPTFKGQPSKPFVGVLSAGINAASPNKELAKEFLENYLLTDEGLEAVNKDKPLGAVALKSYEEELVKDPRIAATMENAQKGEIMPNIPQMSAFWYAVRTAVINAASGRQTVDEALKDAQTNLEHHHHHH

SEQ ID NO: 27024 - protein, 445 aa, Artificial Sequence
  Synthetic
  MISC_FEATURE (1)..(1): optional
  MISC_FEATURE (58)..(445): optional
MDTVKRILEELRRRFEKLAKDLDDIARKLLEDHKKHNKELKDKQRKIKKEADDAARSGSENLYFQGSGSGKIEEGKLVIWINGDKGYNGLAEVGKKFEKDTGIKVTVEHPDKLEEKFPQVAATGDGPDIIFWAHDRFGGYAQSGLLAEITPDKAFQDKLYPFTWDAVRYNGKLIAYPIAVEALSLIYNKDLLPNPPKTWEEIPALDKELKAKGKSALMFNLQEPYFTWPLIAADGGYAFKYENGKYDIKDVGVDNAGAKAGLTFLVDLIKNKHMNADTDYSIAEAAFNKGETAMTINGPWAWSNIDTSKVNYGVTVLPTFKGQPSKPFVGVLSAGINAASPNKELAKEFLENYLLTDEGLEAVNKDKPLGAVALKSYEEELVKDPRIAATMENAQKGEIMPNIPQMSAFWYAVRTAVINAASGRQTVDEALKDAQTNLEHHHHHH

SEQ ID NO: 27025 - protein, 445 aa, Artificial Sequence
  Synthetic
  MISC_FEATURE (1)..(1): optional
  MISC_FEATURE (58)..(445): optional
MDDVERRLRKANKESKKEAEELTEEAKKANEKTKEDSKELTKENRKTNKTIKDEARSGSENLYFQGSGSGKIEEGKLVIWINGDKGYNGLAEVGKKFEKDTGIKVTVEHPDKLEEKFPQVAATGDGPDIIFWAHDRFGGYAQSGLLAEITPDKAFQDKLYPFTWDAVRYNGKLIAYPIAVEALSLIYNKDLLPNPPKTWEEIPALDKELKAKGKSALMFNLQEPYFTWPLIAADGGYAFKYENGKYDIKDVGVDNAGAKAGLTFLVDLIKNKHMNADTDYSIAEAAFNKGETAMTINGPWAWSNIDTSKVNYGVTVLPTFKGQPSKPFVGVLSAGINAASPNKELAKEFLENYLLTDEGLEAVNKDKPLGAVALKSYEEELVKDPRIAATMENAQKGEIMPNIPQMSAFWYAVRTAVINAASGRQTVDEALKDAQTNLEHHHHHH

SEQ ID NO: 27026 - protein, 445 aa, Artificial Sequence
  Synthetic
  MISC_FEATURE (1)..(1): optional
  MISC_FEATURE (58)..(445): optional
MDDEERRSEKTVQDAKREIKKVEDDLQRLNEEQKKKVKKQEDENQKTLKKHKDDARSGSENLYFQGSGSGKIEEGKLVIWINGDKGYNGLAEVGKKFEKDTGIKVTVEHPDKLEEKFPQVAATGDGPDIIFWAHDRFGGYAQSGLLAEITPDKAFQDKLYPFTWDAVRYNGKLIAYPIAVEALSLIYNKDLLPNPPKTWEEIPALDKELKAKGKSALMFNLQEPYFTWPLIAADGGYAFKYENGKYDIKDVGVDNAGAKAGLTFLVDLIKNKHMNADTDYSIAEAAFNKGETAMTINGPWAWSNIDTSKVNYGVTVLPTFKGQPSKPFVGVLSAGINAASPNKELAKEFLENYLLTDEGLEAVNKDKPLGAVALKSYEEELVKDPRIAATMENAQKGEIMPNIPQMSAFWYAVRTAVINAASGRQTVDEALKDAQTNLEHHHHHH

SEQ ID NO: 27027 - protein, 456 aa, Artificial Sequence
  Synthetic
  MISC_FEATURE (1)..(400): optional
  misc_feature (443)..(443): Xaa can be any naturally occurring amino acid
  misc_feature (453)..(453): Xaa can be any naturally occurring amino acid
MGSSHHHHHHSSGLVPRGSHMKIEEGKLVIWINGDKGYNGLAEVGKKFEKDTGIKVTVEHPDKLEEKFPQVAATGDGPDIIFWAHDRFGGYAQSGLLAEITPDKAFQDKLYPFTWDAVRYNGKLIAYPIAVEALSLIYNKDLLPNPPKTWEEIPALDKELKAKGKSALMFNLQEPYFTWPLIAADGGYAFKYENGKYDIKDVGVDNAGAKAGLTFLVDLIKNKHMNADTDYSIAEAAFNKGETAMTINGPWAWSNIDTSKVNYGVTVLPTFKGQPSKPFVGVLSAGINAASPNKELAKEFLENYLLTDEGLEAVNKDKPLGAVALKSYEEELVKDPRIAATMENAQKGEIMPNIPQMSAFWYAVRTAVINAASGRQTVDEALKDAQTNSGSGSGENLYFQDEARKAIARVKRESKRIVEDAERLIREAAAASEKISREAERLXREAAAASEKXSRE

SEQ ID NO: 27028 - protein, 444 aa, Artificial Sequence
  Synthetic
  MISC_FEATURE (1)..(400): optional
  misc_feature (435)..(435): Xaa can be any naturally occurring amino acid
  misc_feature (443)..(443): Xaa can be any naturally occurring amino acid
MGSSHHHHHHSSGLVPRGSHMKIEEGKLVIWINGDKGYNGLAEVGKKFEKDTGIKVTVEHPDKLEEKFPQVAATGDGPDIIFWAHDRFGGYAQSGLLAEITPDKAFQDKLYPFTWDAVRYNGKLIAYPIAVEALSLIYNKDLLPNPPKTWEEIPALDKELKAKGKSALMFNLQEPYFTWPLIAADGGYAFKYENGKYDIKDVGVDNAGAKAGLTFLVDLIKNKHMNADTDYSIAEAAFNKGETAMTINGPWAWSNIDTSKVNYGVTVLPTFKGQPSKPFVGVLSAGINAASPNKELAKEFLENYLLTDEGLEAVNKDKPLGAVALKSYEEELVKDPRIAATMENAQKGEIMPNIPQMSAFWYAVRTAVINAASGRQTVDEALKDAQTNSGSGSGENLYFQDEARKAIARVKRESKRIVEDAERLIREAAAASEKXSREAERLXR

SEQ ID NO: 27029 - protein, 456 aa, Artificial Sequence
  Synthetic
  MISC_FEATURE (1)..(400): optional
  misc_feature (443)..(443): Xaa can be any naturally occurring amino acid
  misc_feature (453)..(453): Xaa can be any naturally occurring amino acid
MGSSHHHHHHSSGLVPRGSHMKIEEGKLVIWINGDKGYNGLAEVGKKFEKDTGIKVTVEHPDKLEEKFPQVAATGDGPDIIFWAHDRFGGYAQSGLLAEITPDKAFQDKLYPFTWDAVRYNGKLIAYPIAVEALSLIYNKDLLPNPPKTWEEIPALDKELKAKGKSALMFNLQEPYFTWPLIAADGGYAFKYENGKYDIKDVGVDNAGAKAGLTFLVDLIKNKHMNADTDYSIAEAAFNKGETAMTINGPWAWSNIDTSKVNYGVTVLPTFKGQPSKPFVGVLSAGINAASPNKELAKEFLENYLLTDEGLEAVNKDKPLGAVALKSYEEELVKDPRIAATMENAQKGEIMPNIPQMSAFWYAVRTAVINAASGRQTVDEALKDAQTNSGSGSGENLYFQDEARKAIARVKRESKRIVEDAERLIREAAQASEKISREARELXERAAQASEKXSRE

SEQ ID NO: 27030 - protein, 444 aa, Artificial Sequence
  Synthetic
  MISC_FEATURE (1)..(400): optional
  misc_feature (435)..(435): Xaa can be any naturally occurring amino acid
  misc_feature (443)..(443): Xaa can be any naturally occurring amino acid
MGSSHHHHHHSSGLVPRGSHMKIEEGKLVIWINGDKGYNGLAEVGKKFEKDTGIKVTVEHPDKLEEKFPQVAATGDGPDIIFWAHDRFGGYAQSGLLAEITPDKAFQDKLYPFTWDAVRYNGKLIAYPIAVEALSLIYNKDLLPNPPKTWEEIPALDKELKAKGKSALMFNLQEPYFTWPLIAADGGYAFKYENGKYDIKDVGVDNAGAKAGLTFLVDLIKNKHMNADTDYSIAEAAFNKGETAMTINGPWAWSNIDTSKVNYGVTVLPTFKGQPSKPFVGVLSAGINAASPNKELAKEFLENYLLTDEGLEAVNKDKPLGAVALKSYEEELVKDPRIAATMENAQKGEIMPNIPQMSAFWYAVRTAVINAASGRQTVDEALKDAQTNSGSGSGENLYFQDEARKAIARVKRESKRIVEDAERLIREAAQASEKXSREAERLXR

SEQ ID NO: 27031 - protein, 80 aa, Artificial Sequence
  Synthetic
  MISC_FEATURE (1)..(24): optional
MGSHHHHHHGSGSENLYFQGSGGSDEARKAIARVKRESKRIVEDAEGLISEAAAASEKISREAERLIREAAAASEKISRE

SEQ ID NO: 27032 - protein, 80 aa, Artificial Sequence
  Synthetic
  MISC_FEATURE (1)..(24): optional
MGSHHHHHHGSGSENLYFQGSGGSDEARKAIARVKRESKRIVEDAERLIREAAGSSEKISREAERLIREAAAASEKISRE

SEQ ID NO: 27033 - protein, 80 aa, Artificial Sequence
  Synthetic
  MISC_FEATURE (1)..(24): optional
MGSHHHHHHGSGSENLYFQGSGGSDEARKAIARVKRESKRIVEDAERLIGEAAAASEKISREAERLIREAAAASEKISRE

SEQ ID NO: 27034 - protein, 68 aa, Artificial Sequence
  Synthetic
  MISC_FEATURE (1)..(24): optional
MGSHHHHHHGSGSENLYFQGSGGSDEARKAIARVKRESKRIVGDAERLIREAAAASEKISREAERLIR

SEQ ID NO: 27035 - protein, 68 aa, Artificial Sequence
  Synthetic
  MISC_FEATURE (1)..(24): optional
MGSHHHHHHGSGSENLYFQGSGGSDEARKAIARVKRESKRIVEDAEGLISEAAAASEKISREAERLIR

SEQ ID NO: 27036 - protein, 68 aa, Artificial Sequence
  Synthetic
  MISC_FEATURE (1)..(24): optional
MGSHHHHHHGSGSENLYFQGSGGSDEARKAIARVAEESKRIVEDAERLIREAAAASEKISREAERLIR

SEQ ID NO: 27037 - protein, 68 aa, Artificial Sequence
  Synthetic
  MISC_FEATURE (1)..(24): optional
MGSHHHHHHGSGSENLYFQGSGGSDEAAKAIARVAEESKRIVEDAERLIREAAAASEKISREAERLIR

SEQ ID NO: 27038 - protein, 68 aa, Artificial Sequence
  Synthetic
  MISC_FEATURE (1)..(24): optional
MGSHHHHHHGSGSENLYFQGSGGSDEARKAIARVKRESKRIVEDAERLIREAAEASEEISREAERLIR

SEQ ID NO: 27039 - protein, 492 aa, Artificial Sequence
  Synthetic
  MISC_FEATURE (1)..(404): optional
  misc_feature (447)..(447): Xaa can be any naturally occurring amino acid
  misc_feature (457)..(457): Xaa can be any naturally occurring amino acid
  MISC_FEATURE (461)..(479): optional
MGSHHHHHHGSGSENLYFQGSGGSMKIEEGKLVIWINGDKGYNGLAEVGKKFEKDTGIKVTVEHPDKLEEKFPQVAATGDGPDIIFWAHDRFGGYAQSGLLAEITPDKAFQDKLYPFTWDAVRYNGKLIAYPIAVEALSLIYNKDLLPNPPKTWEEIPALDKELKAKGKSALMFNLQEPYFTWPLIAADGGYAFKYENGKYDIKDVGVDNAGAKAGLTFLVDLIKNKHMNADTDYSIAEAAFNKGETAMTINGPWAWSNIDTSKVNYGVTVLPTFKGQPSKPFVGVLSAGINAASPNKELAKEFLENYLLTDEGLEAVNKDKPLGAVALKSYEEELVKDPRIAATMENAQKGEIMPNIPQMSAFWYAVRTAVINAASGRQTVDEALKDAQTNSGSGSGENLYFQDEARKAIARVKRESKRIVEDAERLIREAAAASEKISREAERLXREAAAASEKXSREGGGSGSGSGSGKPGQASGSAHIVMVDAYKPTK

SEQ ID NO: 27040 - protein, 480 aa, Artificial Sequence
  Synthetic
  MISC_FEATURE (1)..(404): optional
  misc_feature (439)..(439): Xaa can be any naturally occurring amino acid
  misc_feature (447)..(447): Xaa can be any naturally occurring amino acid
  MISC_FEATURE (449)..(467): optional
MGSHHHHHHGSGSENLYFQGSGGSMKIEEGKLVIWINGDKGYNGLAEVGKKFEKDTGIKVTVEHPDKLEEKFPQVAATGDGPDIIFWAHDRFGGYAQSGLLAEITPDKAFQDKLYPFTWDAVRYNGKLIAYPIAVEALSLIYNKDLLPNPPKTWEEIPALDKELKAKGKSALMFNLQEPYFTWPLIAADGGYAFKYENGKYDIKDVGVDNAGAKAGLTFLVDLIKNKHMNADTDYSIAEAAFNKGETAMTINGPWAWSNIDTSKVNYGVTVLPTFKGQPSKPFVGVLSAGINAASPNKELAKEFLENYLLTDEGLEAVNKDKPLGAVALKSYEEELVKDPRIAATMENAQKGEIMPNIPQMSAFWYAVRTAVINAASGRQTVDEALKDAQTNSGSGSGENLYFQDEARKAIARVKRESKRIVEDAERLIREAAAASEKXSREAERLXRGGGSGSGSGSGKPGQASGSAHIVMVDAYKPTK

SEQ ID NO: 27041 - protein, 510 aa, Artificial Sequence
  Synthetic
  MISC_FEATURE (1)..(454): optional
MGSSHHHHHHSSGLVPRGSHMSKGEELFTGVVPILVELDGDVNGHKFSVRGEGEGDATNGKLTLKFICTTGKLPVPWPTLVTTLTYGVQCFARYPDHMKQHDFFKSAMPEGYVQERTISFKDDGTYKTRAEVKFEGDTLVNRIELKGIDFKEDGNILGHKLEYNFNSHNVYITADKQKNGIKANFKIRHNVEDGSVQLADHYQQNTPIGDGPVLLPDNHYLSTQSVLSKDPNEKRDHMVLLEFVTAAGITHGMDELYKSGSGSGCFAKGTNVLMADGSIECIENIEVGNKVMGKDGRPREVIKLPRGRETMYSVVQKSQHRAHKSDSSREVPELLKFTCNATHELVVRTPRSVRRLSRTIKGVEYFEVITFEMGQKKAPDGRIVELVKEVSKSYPISEGPERANELVESYRKASNKAYFEWTIEARDLSLLGSHVRKATYQTYAPILYGGSGGSDEARKAIARVKRESKRIVEDAERLIREAAAASEKISREAERLIREAAAASEKISRE

SEQ ID NO: 27042 - protein, 394 aa, Artificial Sequence
  Synthetic
  MISC_FEATURE (1)..(22): optional
  MISC_FEATURE (79)..(394): optional
MGSHHHHHHGSGSENLYFQGSGDEARKAIARVKRESKRIVEDAERLIREAAAASEKISREAERLIREAAAASEKISREGSGGSGSGGGVLLNVLSKCAGSKKFRPAPAAAFARECRGFYFELQELKEDDYYGITLSDDSDHQFLLANQVVVHNCGSGGSVSKGEEDNMAIIKEFMRFKVHMEGSVNGHEFEIEGEGEGRPYEGTQTAKLKVTKGGPLPFAWDILSPQFMYGSKAYVKHPADIPDYLKLSFPEGFKWERVMNFEDGGVVTVTQDSSLQDGEFIYKVKLRGTNFPSDGPVMQKKTMGWEASSERMYPEDGALKGEIKQRLKLKDGGHYDAEVKTTYKAKKPVQLPGAYNVNIKLDITSHNEDYTIVEQYERAEGRHSTGGMDELYK

SEQ ID NO: 27043 - protein, 58 aa, Artificial Sequence
  Synthetic
DKVRKVAEVAEKVLRDIDKLDRESKEAFRRTNGEISKLDEDTRRVAERVKKAIEDLAK

SEQ ID NO: 27044 - protein, 54 aa, Artificial Sequence
  Synthetic
SEVDEIIADNERALDEVRREVEEIDKENAERLKEWVEEAREILDRLAKALEEIR

SEQ ID NO: 27045 - protein, 60 aa, Artificial Sequence
  Synthetic
PEEALSKAIKDVRDIVKKVKDELKEWRDRNKELVDRLSEELKEWLKDVERVLKELTDKDR

SEQ ID NO: 27046 - protein, 56 aa, Artificial Sequence; identical to SEQ ID NO: 26790
  Synthetic

SEQ ID NO: 27047 - protein, 59 aa, Artificial Sequence
  Synthetic
SRLVKKLDEIVKEVAKKLEDVVRANEELWRKLVELNKESVARLREAVERVARDLEETAR

SEQ ID NO: 27048 - protein, 54 aa, Artificial Sequence
  Synthetic
SDEERLEKVVKDVIEKVRRILEKWKKDIDKVVKELRRILEEWEKIIREVLDKVR

SEQ ID NO: 27049 - protein, 57 aa, Artificial Sequence
  Synthetic
DKDAVIKVIEKLIRANAAVWDALLKINEDLVRVNKTVWKELLRVNEKLARDLERVVK

SEQ ID NO: 27050 - protein, 55 aa, Artificial Sequence
  Synthetic
SLVDELRKSLERNVRVSEEVARRLKEALKRWVDVVRKVVEDLIRLNEDVVRVVEK

SEQ ID NO: 27051 - protein, 59 aa, Artificial Sequence; identical to SEQ ID NO: 27047
  Synthetic

SEQ ID NO: 27052 - protein, 16 aa, Artificial Sequence
  Synthetic
RDHMVLHEYVNAAGIT

SEQ ID NO: 27053 - protein, 6 aa, Artificial Sequence
  Synthetic
RLVGFE

SEQ ID NO: 27054 - protein, 13 aa, Artificial Sequence
  Synthetic
  MISC_FEATURE (11)..(13): optional
AHIVMVDAYKPTK

SEQ ID NO: 27055 - protein, 9 aa, Artificial Sequence
  Synthetic
AAAKRARTS

SEQ ID NO: 27056 - protein, 11 aa, Artificial Sequence
  Synthetic
LALKLAGLDIN

SEQ ID NO: 27057 - protein, 12 aa, Artificial Sequence
  Synthetic
ELAEKLAGLDIN

SEQ ID NO: 27058 - protein, 13 aa, Artificial Sequence
  Synthetic
ELAEKLRAGLDLN

SEQ ID NO: 27059 - protein, 27 aa, Artificial Sequence
  Synthetic
TMFSSNRQKILERTETLNQEWKQRRIQ

SEQ ID NO: 27060 - protein, 10 aa, Artificial Sequence
  Synthetic
ETFSDLWKLL

SEQ ID NO: 27061 - protein, 33 aa, Artificial Sequence
  Synthetic
GELDELVYLLDGPGYDPIHSDVVTRGGSHLFNF

SEQ ID NO: 27062 - protein, 12 aa, Artificial Sequence
  Synthetic
TMDDVYNYLFDD

SEQ ID NO: 27063 - protein, 13 aa, Artificial Sequence
  Synthetic
LLTGLFVQYLFDD

SEQ ID NO: 27064 - protein, 11 aa, Artificial Sequence
  Synthetic
DDAVVESFFSS

SEQ ID NO: 27065 - protein, 9 aa, Artificial Sequence
  Synthetic
GDFLSDLFD

SEQ ID NO: 27066 - protein, 9 aa, Artificial Sequence
  Synthetic
GDVLSDLVD

SEQ ID NO: 27067 - protein, 13 aa, Artificial Sequence
  Synthetic
NIQMLLEAADYLE

SEQ ID NO: 27068 - protein, 13 aa, Artificial Sequence
  Synthetic
NIAMLLAAAAYLE

SEQ ID NO: 27069 - protein, 4 aa, Artificial Sequence
  Synthetic
IQIG

SEQ ID NO: 27070 - protein, 4 aa, Artificial Sequence
  Synthetic
VQLG

SEQ ID NO: 27071 - protein, 11 aa, Artificial Sequence
  Synthetic
VSGWRLFKKIS

SEQ ID NO: 27072 - protein, 27 aa, Artificial Sequence
  Synthetic
GLEQEIAALEKENAALEWEIAALEQGG

SEQ ID NO: 27073 - protein, 27 aa, Artificial Sequence
  Synthetic
GLKQKIAALKYKNAALKKKIAALKQGG

SEQ ID NO: 27074 - protein, 33 aa, Artificial Sequence
  Synthetic
RMKQLEDKVEELLSKNYHLENEVARLKKLVGER

SEQ ID NO: 27075 - protein, 30 aa, Artificial Sequence
  Synthetic
GEIAALKQEIAALKKENAALKWEIAALKQG

SEQ ID NO: 27076 - protein, 30 aa, Artificial Sequence
  Synthetic
WEAALAEALAEALAEHLAEALAEALEALAA

SEQ ID NO: 27077 - protein, 13 aa, Artificial Sequence
  Synthetic
GLFDIIKKIAESF

SEQ ID NO: 27078 - protein, 23 aa, Artificial Sequence
  Synthetic
GIGKFLHSAGKFGKAFVGEIMKS

SEQ ID NO: 27079 - protein, 23 aa, Artificial Sequence
  Synthetic
GIGKFLHSAKKFGKAFVGEIMNS

SEQ ID NO: 27080 - protein, 26 aa, Artificial Sequence
  Synthetic
GIGAVLKVLTTGLPALISWIKRKRQQ

SEQ ID NO: 27081 - protein, 14 aa, Artificial Sequence
  Synthetic
INWKGIAAMAKKLL

SEQ ID NO: 27082 - protein, 37 aa, Artificial Sequence
  Synthetic
KWKLFKKIEKVGQNIRDGIIKAGPAVAVVGQATQIAK

SEQ ID NO: 27083 - protein, 31 aa, Artificial Sequence
  Synthetic
SWLSKTAKKLENSAKKRISEGIAIAIQGGPR

SEQ ID NO: 27084 - protein, 16 aa, Artificial Sequence
  Synthetic
GLFDVIKKVASVIGGL

SEQ ID NO: 27085 - protein, 14 aa, Artificial Sequence
  Synthetic
NFLGTLINLAKKIL

SEQ ID NO: 27086 - protein, 23 aa, Artificial Sequence
  Synthetic
SYFILRRRRKRFPYFFTDVRVAA

SEQ ID NO: 27087 - protein, 21 aa, Artificial Sequence
  Synthetic
AFSWGSLWSGIKNFGSTVKNY

SEQ ID NO: 27088 - protein, 21 aa, Artificial Sequence
  Synthetic
ASMWERVKSIIKSSLAAASNI

SEQ ID NO: 27089 - protein, 50 aa, Artificial Sequence
  Synthetic
VTSTITEKLLKNLIKIISSLVIITRNYEDTTTVLATLALLGCDASPWQWL

SEQ ID NO: 27090 - protein, 24 aa, Artificial Sequence
  Synthetic
IAQNPVENYIDEVLNEVLVVPNIN

SEQ ID NO: 27091 - protein, 20 aa, Artificial Sequence
  Synthetic
FLGIAEAIDIGNGWEGMEFG

SEQ ID NO: 27092 - protein, 20 aa, Artificial Sequence
  Synthetic
GLFGAIAGFIENGWEGMIDG

SEQ ID NO: 27093 - protein, 23 aa, Artificial Sequence
  Synthetic
GLFGAIAGFIENGWEGMIDGWYG

SEQ ID NO: 27094 - protein, 285 aa, Artificial Sequence; identical to SEQ ID NO: 67
  Synthetic

SEQ ID NO: 27095 - protein, 236 aa, Artificial Sequence
  Synthetic
MSLVDELEIWIAQELRRIGDEFNAYYAALKRWVDVVRKVVEDLIRLNEDVVRVVEKVGVDESAIERVRRIIEELNRALDAVLKKNEDLVRRLTELLDKLLEENRRLVEELDEDLKRRGGTEEVIDTILELIERSIERLKRLLDELLRIVREALKDNARVADENLKALKEILDELRKDGVSDEELKRVLEKAADLHARLKDAHRKLLEDLERIIRELKKKLDEVVEENKRSVDELKR

SEQ ID NO: 27096 - protein, 237 aa, Artificial Sequence; identical to SEQ ID NO: 90
  Synthetic

SEQ ID NO: 27097 - protein, 175 aa, Artificial Sequence; identical to SEQ ID NO: 91
  Synthetic

SEQ ID NO: 27098 - protein, 289 aa, Artificial Sequence
  Synthetic
MSELARKLLEASTKLQRLNIRLAEALLEAIARLQELNLELVYLAVELTDPKRIRDEIKEVKDKSKEIIRRAEKEIDDAAKESEKILEEAREAISGSGSELAKLLLKAIAETQDLNLRAAKAFLEAAAKLQELNIRAVELLVKLTDPATIREALEHAKRRSKEIIDEAERAIRAAKRESERIIEEARRLIEKGSGSGSELARELLRAHAQLQRLNLELLRELLRALAQLQELNLDLLRLASELTDPDEARAHIVMVDAYKKRIVEDAERLIREAAAASEKISREAERLIR

SEQ ID NO: 27099 - protein, 289 aa, Artificial Sequence
  Synthetic
MSELARKLLEASTKLQRLNIRLAEALLEAIARLQELNLELVYLAVELTDPKRIRDEIKEVKDKSKEIIRRAEKEIDDAAKESEKILEEAREAISGSGSELAKLLLKAIAETQDLNLRAAKAFLEAAAKLQELNIRAVELLVKLTDPATIREALEHAKRRSKEIIDEAERAIRAAKRESERIIEEARRLIEKGSGSGSELARELLRAHAQLQRLNLELLRELLRALAQLQELNLDLLRLASELTDPDEARKAIARVKRESKAHIVMVDAYKREAAAASEKISREAERLIR

SEQ ID NO: 27100 - protein, 289 aa, Artificial Sequence
  Synthetic
MSELARKLLEASTKLQRLNIRLAEALLEAIARLQELNLELVYLAVELTDPKRIRDEIKEVKDKSKEIIRRAEKEIDDAAKESEKILEEAREAISGSGSELAKLLLKAIAETQDLNLRAAKAFLEAAAKLQELNIRAVELLVKLTDPATIREALEHAKRRSKEIIDEAERAIRAAKRESERIIEEARRLIEKGSGSGSELARELLRAHAQLQRLNLELLRELLRALAQLQELNLDLLRLASELTDPDEARENLYFQGSESKRIVEDAERLIREAAAASEKISREAERLIR

SEQ ID NO: 27101 - protein, 289 aa, Artificial Sequence
  Synthetic
MSELARKLLEASTKLQRLNIRLAEALLEAIARLQELNLELVYLAVELTDPKRIRDEIKEVKDKSKEIIRRAEKEIDDAAKESEKILEEAREAISGSGSELAKLLLKAIAETQDLNLRAAKAFLEAAAKLQELNIRAVELLVKLTDPATIREALEHAKRRSKEIIDEAERAIRAAKRESERIIEEARRLIEKGSGSGSELARELLRAHAQLQRLNLELLRELLRALAQLQELNLDLLRLASELTDPDEARKAIARVKRESKRIVENLYFQGSEAAAASEKISREAERLIR

SEQ ID NO: 27102 - protein, 289 aa, Artificial Sequence
  Synthetic
MSELARKLLEASTKLQRLNIRLAEALLEAIARLQELNLELVYLAVELTDPKRIRDEIKEVKDKSKEIIRRAEKEIDDAAKESEKILEEAREAISGSGSELAKLLLKAIAETQDLNLRAAKAFLEAAAKLQELNIRAVELLVKLTDPATIREALEHAKRRSKEIIDEAERAIRAAKRESERIIEEARRLIEKGSGSGSELARELLRAHAQLQRLNLELLRELLRALAQLQELNLDLLRLASELTDPDEARVSGWRLFKKISRIVEDAERLIREAAAASEKISREAERLIR

SEQ ID NO: 27103 - protein, 289 aa, Artificial Sequence
  Synthetic
MSELARKLLEASTKLQRLNIRLAEALLEAIARLQELNLELVYLAVELTDPKRIRDEIKEVKDKSKEIIRRAEKEIDDAAKESEKILEEAREAISGSGSELAKLLLKAIAETQDLNLRAAKAFLEAAAKLQELNIRAVELLVKLTDPATIREALEHAKRRSKEIIDEAERAIRAAKRESERIIEEARRLIEKGSGSGSELARELLRAHAQLQRLNLELLRELLRALAQLQELNLDLLRLASELTDPDEARKAIARVKRESKVSGWRLFKKISEAAAASEKISREAERLIR

SEQ ID NO: 27104 - protein, 289 aa, Artificial Sequence
  Synthetic
MSELARKLLEASTKLQRLNIRLAEALLEAIARLQELNLELVYLAVELTDPKRIRDEIKEVKDKSKEIIRRAEKEIDDAAKESEKILEEAREAISGSGSELAKLLLKAIAETQDLNLRAAKAFLEAAAKLQELNIRAVELLVKLTDPATIREALEHAKRRSKEIIDEAERAIRAAKRESERIIEEARRLIEKGSGSGSELARELLRAHAQLQRLNLELLRELLRALAQLQELNLDLLRLASELTDPDEARKAIIQIGRESKRIVEDAERLIREAAAASEKISVQLGRLIR

SEQ ID NO: 27105 - protein, 289 aa, Artificial Sequence
  Synthetic
MSELARKLLEASTKLQRLNIRLAEALLEAIARLQELNLELVYLAVELTDPKRIRDEIKEVKDKSKEIIRRAEKEIDDAAKESEKILEEAREAISGSGSELAKLLLKAIAETQDLNLRAAKAFLEAAAKLQELNIRAVELLVKLTDPATIREALEHAKRRSKEIIDEAERAIRAAKRESERIIEEARRLIEKGSGSGSELARELLRAHAQLQRLNLELLRELLRALAQLQELNLDLLRLASELTDPDEARKAIARVKRESKRIVIQIGRLIVQLGAASEKISREAERLIR

SEQ ID NO: 27106 - protein, 289 aa, Artificial Sequence
  Synthetic
MSELARKLLEASTKLQRLNIRLAEALLEAIARLQELNLELVYLAVELTDPKRIRDEIKEVKDKSKEIIRRAEKEIDDAAKESEKILEEAREAISGSGSELAKLLLKAIAETQDLNLRAAKAFLEAAAKLQELNIRAVELLVKLTDPATIREALEHAKRRSKEIIDEAERAIRAAKRESERIIEEARRLIEKGSGSGSELARELLRAHAQLQRLNLELLRELLRALAQLQELNLDLLRLASELTDPDEARKAIARVKRESKRIVIQIGRLIREAAAASEKISVQLGRLIR

SEQ ID NO: 27107 - protein, 289 aa, Artificial Sequence
  Synthetic
MSELARKLLEASTKLQRLNIRLAEALLEAIARLQELNLELVYLAVELTDPKRIRDEIKEVKDKSKEIIRRAEKEIDDAAKESEKILEEAREAISGSGSELAKLLLKAIAETQDLNLRAAKAFLEAAAKLQELNIRAVELLVKLTDPATIREALEHAKRRSKEIIDEAERAIRAAKRESERIIEEARRLIEKGSGSGSELARELLRAHAQLQRLNLELLRELLRALAQLQELNLDLLRLASELTDPDESVKELEDKVEELLSKNYHLENEVARLKKLVGERSREAERLIR

SEQ ID NO: 27108 - protein, 289 aa, Artificial Sequence
  Synthetic
MSELARKLLEASTKLQRLNIRLAEALLEAIARLQELNLELVYLAVELTDPKRIRDEIKEVKDKSKEIIRRAEKEIDDAAKESEKILEEAREAISGSGSELAKLLLKAIAETQDLNLRAAKAFLEAAAKLQELNIRAVELLVKLTDPATIREALEHAKRRSKEIIDEAERAIRAAKRESERIIEEARRLIEKGSGSGSELARELLRAHAQLQRLNLELLRELLRALAQLQELNLDLLRLASELTDPDEARKAIAGEIAALKQEIAALKKENAALKWEIAALKQGAERLIR

SEQ ID NO: 27109 - protein, 289 aa, Artificial Sequence
  Synthetic
MSELARKLLEASTKLQRLNIRLAEALLEAIARLQELNLELVYLAVELTDPKRIRDEIKEVKDKSKEIIRRAEKEIDDAAKESEKILEEAREAISGSGSELAKLLLKAIAETQDLNLRAAKAFLEAAAKLQELNIRAVELLVKLTDPATIREALEHAKRRSKEIIDEAERAIRAAKRESERIIEEARRLIEKGSGSGSELARELLRAHAQLQRLNLELLRELLRALAQLQELNLDLLRLASELTDPDEARKAIARVKRGLEQEIAALEKENAALEWEIAALEQGGERLIR

SEQ ID NO: 27110 - protein, 289 aa, Artificial Sequence
  Synthetic
MSELARKLLEASTKLQRLNIRLAEALLEAIARLQELNLELVYLAVELTDPKRIRDEIKEVKDKSKEIIRRAEKEIDDAAKESEKILEEAREAISGSGSELAKLLLKAIAETQDLNLRAAKAFLEAAAKLQELNIRAVELLVKLTDPATIREALEHAKRRSKEIIDEAERAIRAAKRESERIIEEARRLIEKGSGSGSELARELLRAHAQLQRLNLELLRELLRALAQLQELNLDLLRLASELTDPDEARKAIARVKRGLKQKIAALKYKNAALKKKIAALKQGGERLIR

SEQ ID NO: 27111 - protein, 288 aa, Artificial Sequence
  Synthetic
SELARKLLEASTKLQRLNIRLAEALLEAIARLQELNLELVYLAVELTDPKRIRDEIKEVKDKSKEIIRRAEKEIDDAAKESEKILEEAREAISGSGSELAKLLLKAIAETQDLNLRAAKAFLEAAAKLQELNIRAVELLVKLTDPATIREALEHAKRRSKEIIDEAERAIRAAKRESERIIEEARRLIEKGSGSGSELARELLRAHAQLQRLNLELLRELLRALAQLQELNLDLLRLASELTDPDEARKAIENLYFQGSRIVEDAEAHIVMVDAYKEKISREAERLIR

SEQ ID NO: 27112 - protein, 288 aa, Artificial Sequence
  Synthetic
SELARKLLEASTKLQRLNIRLAEALLEAIARLQELNLELVYLAVELTDPKRIRDEIKEVKDKSKEIIRRAEKEIDDAAKESEKILEEAREAISGSGSELAKLLLKAIAETQDLNLRAAKAFLEAAAKLQELNIRAVELLVKLTDPATIREALEHAKRRSKEIIDEAERAIRAAKRESERIIEEARRLIEKGSGSGSELARELLRAHAQLQRLNLELLRELLRALAQLQELNLDLLRLASELTDPDEARKAIARVENLYFQGSEDAERLIREAAHIVMVDAYKAERLIR

SEQ ID NO: 27113 - protein, 288 aa, Artificial Sequence
  Synthetic
SELARKLLEASTKLQRLNIRLAEALLEAIARLQELNLELVYLAVELTDPKRIRDEIKEVKDKSKEIIRRAEKEIDDAAKESEKILEEAREAISGSGSELAKLLLKAIAETQDLNLRAAKAFLEAAAKLQELNIRAVELLVKLTDPATIREALEHAKRRSKEIIDEAERAIRAAKRESERIIEEARRLIEKGSGSGSELARELLRAHAQLQRLNLELLRELLRALAQLQELNLDLLRLASELTDPDEARKAIARVKENLYFQGSDAERLIREAAHIVMVDAYKAERLIR

SEQ ID NO: 27114 - protein, 359 aa, Artificial Sequence
  Synthetic
SKEAAKKLQDLNIELARKLLEASTKLQRLNIRLAEALLEAIARLQELNLELVYLAVELTDPKRIRDEIKEVKDKSKEIIRRAEKEIDDAAKESKKILEEARKAIRDAAEESRKILEEGSGSGSDALDELQKLNLELAKLLLKAIAETQDLNLRAAKAFLEAAAKLQELNIRAVELLVKLTDPATIRRALEHAKRRSKEIIDEAERAIRAAKRESERIIEEARRLIEKAKEESERIIREGSGSGDPDIKKLQDLNIELARELLRAHAQLQRLNLELLRELLRALAQLQELNLDLLRLASELTDPDEARKAIARVKENLYFQGSDAERLIREAAAASEAHIVMVDAYKREAAAASEKISRE

SEQ ID NO: 27115 - protein, 359 aa, Artificial Sequence
  Synthetic
SKEAAKKLQDLNIELARKLLEASTKLQRLNIRLAEALLEAIARLQELNLELVYLAVELTDPKRIRDEIKEVKDKSKEIIRRAEKEIDDAAKESKKILEEARKAIRDAAEESRKILEEGSGSGSDALDELQKLNLELAKLLLKAIAETQDLNLRAAKAFLEAAAKLQELNIRAVELLVKLTDPATIRRALEHAKRRSKEIIDEAERAIRAAKRESERIIEEARRLIEKAKEESERIIREGSGSGDPDIKKLQDLNIELARELLRAHAQLQRLNLELLRELLRALAQLQELNLDLLRLASELTDPDEARKAIARVKENLYFQGSDAERLIREAAAASEKISREAEAHIVMVDAYKEKISRE

SEQ ID NO: 27116 - protein, 760 aa, Artificial Sequence
  Synthetic
VSKGEELFTGVVPILVELDGDVNGHKFSVSGEGEGDATYGKLTLKFICTTGKLPVPWPTLVTTLSWGVQCFARYPDHMKQHDFFKSAMPEGYVQERTIFFKDDGNYKTRAEVKFEGDTLVNRIELKGIDFKEDGNILGHKLEYNYFSDNVYITADKQKNGIKANFKIRHNIEDGGVQLADHYQQNTPIGDGPVLLPDNHYLSTQSKLSKDPNEKRDHMVLLEFVTAAGITLELARKLLEASTKLQRLNIRLAEALLEAIARLQELNLELVYLAVELTDPKRIRDEIKEVKDKSKEIIRRAEKEIDDAAKESEKILEEAREAISGSGSELAKLLLKAIAETQDLNLRAAKAFLEAAAKLQELNIRAVELLVKLTDPATIREALEHAKRRSKEIIDEAERAIRAAKRESERIIEEARRLIEKGSGSGSELARELLRAHAQLQRLNLELLRELLRALAQLQELNLDLLRLASELTDEIWIAQELRRIGDEFNAYYADAERLIREAAAASEKISREAERLIRVSKGEELFTGVVPILVELDGDVNGHKFSVSGEGEGDATYGKLTLKLICTTGKLPVPWPTLVTTLGYGVQCFARYPDHMKQHDFFKSAMPEGYVQERTIFFKDDGNYKTRAEVKFEGDTLVNRIELKGIDFKEDGNILGHKLEYNYNSHNVYITADKQKNGIKANFKIRHNIEDGGVQLADHYQQNTPIGDGPVLLPDNHYLSYQSKLSKDPNEKRDHMVLLEFVTAAGITLGMDELYKGSGC

SEQ ID NO: 27117 - protein, 750 aa, Artificial Sequence
  Synthetic
VSKGEELFTGVVPILVELDGDVNGHKFSVSGEGEGDATYGKLTLKFICTTGKLPVPWPTLVTTLSWGVQCFARYPDHMKQHDFFKSAMPEGYVQERTIFFKDDGNYKTRAEVKFEGDTLVNRIELKGIDFKEDGNILGHKLEYNYFSDNVYITADKQKNGIKANFKIRHNIEDGGVQLADHYQQNTPIGDGPVLLPDNHYLSTQSKLSKDPNEKRDHMVLLEFVTAAGITLELARKLLEASTKLQRLNIRLAEALLEAIARLQELNLELVYLAVELTDPKRIRDEIKEVKDKSKEIIRRAEKEIDDAAKESEKILEEAREAISGSGSELAKLLLKAIAETQDLNLRAAKAFLEAAAKLQELNIRAVELLVKLTDPATIREALEHAKRRSKEIIDEAERAIRAAKRESERIIEEARRLIEKGSGSGSELARELLRAHAQLQRLNLELLRELLRALAQLQELNLDLLRLASELTDPDEARKAIARVKRESNAYYADAERLIREAAAASEKVSKGEELFTGVVPILVELDGDVNGHKFSVSGEGEGDATYGKLTLKLICTTGKLPVPWPTLVTTLGYGVQCFARYPDHMKQHDFFKSAMPEGYVQERTIFFKDDGNYKTRAEVKFEGDTLVNRIELKGIDFKEDGNILGHKLEYNYNSHNVYITADKQKNGIKANFKIRHNIEDGGVQLADHYQQNTPIGDGPVLLPDNHYLSYQSKLSKDPNEKRDHMVLLEFVTAAGITLGMDELYKGSGC

SEQ ID NO: 27118 - protein, 75 aa, Artificial Sequence
  Synthetic
MDAKSLTAWSRTLVTFKDVFVDFTREEWKLLDTAQQIVYRNVMLENYKNLVSLGYQLTKPDVILRLEKGEEPWLV

SEQ ID NO: 27119 - protein, 45 aa, Artificial Sequence
  Synthetic
RTLVTFKDVFVDFTREEWKLLDTAQQIVYRNVMLENYKNLVSLGY

SEQ ID NO: 27120 - protein, 407 aa, Artificial Sequence
  Synthetic
MSKEAVTKLQALNIKLAEKLLEAVTKLQALNIKLAEKLLEALARLQELNIALVYLAVELTDPKRIADEIKKVKDKSKEIVERAEEEIARAAAESKKILDEAEEEIARAAAESKKILDEGSGSGSDAVAELQALNLKLAELLLEAVAELQALNLKLAELLLEAIAKLQELNIKLVELLTKLTDPATIREAIRKVKEDSERIVAEAERLIAAAKAESERIIREAERLIAAAKAESERIIREGSGSGDPDVARLQELNIELARELLRDVARLQELNIELARELLRAAAELQELNIKLVELASELTGSRTLVTFKDVFVDFTREEWKLLDTAQQIVYRNVMLENYKNLVSLGYGSDEARKAIARVKRESKRIVEDAERLIREAAAASEKISREAERLIREAAAASEKISRE

SEQ ID NO: 27121 - protein, 394 aa, Artificial Sequence
  Synthetic
MSKEAVTKLQALNIKLAEKLLEAVTKLQALNIKLAEKLLEALARLQELNIALVYLAVELTDPKRIADEIKKVKDKSKEIVERAEEEIARAAAESKKILDEAEEEIARAAAESKKILDEGSGSGSDAVAELQALNLKLAELLLEAVAELQALNLKLAELLLEAIAKLQELNIKLVELLTKLTDPATIREAIRKVKEDSERIVAEAERLIAAAKAESERIIREAERLIAAAKAESERIIREGSGSGDPDVARLQELNIELARELLRDVARLQELNIELARELLRAAAELQELNIKLVELASELTGSRTLVTFKDVFVDFTREEWKLLDTAQQIVYRNVMLENYKNLVSLGYGSSKRIVEDAERLIREAAAASEKISREAERLIREAAAASEKISRE

SEQ ID NO: 27122 - protein, 398 aa, Artificial Sequence
  Synthetic
MSKEAVTKLQALNIKLAEKLLEAVTKLQALNIKLAEKLLEALARLQELNIALVYLAVELTDPKRIADEIKKVKDKSKEIVERAEEEIARAAAESKKILDEAEEEIARAAAESKKILDEGSGSGSDAVAELQALNLKLAELLLEAVAELQALNLKLAELLLEAIAKLQELNIKLVELLTKLTDPATIREAIRKVKEDSERIVAEAERLIAAAKAESERIIREAERLIAAAKAESERIIREGSGSGDPDVARLQELNIELARELLRDVARLQELNIELARELLRAAAELQELNIKLVELASELTGSRTLVTFKDVFVDFTREEWKLLDTAQQIVYRNVMLENYKNLVSLGYGSDEARKAIARVKRESKRIVEDAERLIREAAAASEKISREAERLIREAA

SEQ ID NO: 27123 - protein, 369 aa, Artificial Sequence
  Synthetic
MSKEAVTKLQALNIKLAEKLLEAVTKLQALNIKLAEKLLEALARLQELNIALVYLAVELTDPKRIADEIKKVKDKSKEIVERAEEEIARAAAESKKILDEAEEEIARAAAESKKILDEGSGSGSDAVAELQALNLKLAELLLEAVAELQALNLKLAELLLEAIAKLQELNIKLVELLTKLTDPATIREAIRKVKEDSERIVAEAERLIAAAKAESERIIREAERLIAAAKAESERIIREGSGSGDPDVARLQELNIELARELLRDVARLQELNIELARELLRAAAELQELNIKLVELASELTDEARKAIARVKRESKRIVEDAERTLVTFKDVFVDFTREEWKLLDTAQQIVYRNVMLENYKNLVSLGY

SEQ ID NO: 27124 - protein, 372 aa, Artificial Sequence
  Synthetic
MSKEAVTKLQALNIKLAEKLLEAVTKLQALNIKLAEKLLEALARLQELNIALVYLAVELTDPKRIADEIKKVKDKSKEIVERAEEEIARAAAESKKILDEAEEEIARAAAESKKILDEGSGSGSDAVAELQALNLKLAELLLEAVAELQALNLKLAELLLEAIAKLQELNIKLVELLTKLTDPATIREAIRKVKEDSERIVAEAERLIAAAKAESERIIREAERLIAAAKAESERIIREGSGSGDPDVARLQELNIELARELLRDVARLQELNIELARELLRAAAELQELNIKLVELASELTDEARKAIARVKRESKRIVEDAERLIRTLVTFKDVFVDFTREEWKLLDTAQQIVYRNVMLENYKNLVSLGY

SEQ ID NO: 27125 - protein, 383 aa, Artificial Sequence
  Synthetic
MSKEAVTKLQALNIKLAEKLLEAVTKLQALNIKLAEKLLEALARLQELNIALVYLAVELTDPKRIADEIKKVKDKSKEIVERAEEEIARAAAESKKILDEAEEEIARAAAESKKILDEGSGSGSDAVAELQALNLKLAELLLEAVAELQALNLKLAELLLEAIAKLQELNIKLVELLTKLTDPATIREAIRKVKEDSERIVAEAERLIAAAKAESERIIREAERLIAAAKAESERIIREGSGSGDPDVARLQELNIELARELLRDVARLQELNIELARELLRAAAELQELNIKLVELASELTDEARKAIARVKRESKRIVEDAERLIREAAAASEKISRTLVTFKDVFVDFTREEWKLLDTAQQIVYRNVMLENYKNLVSLGY

SEQ ID NO: 27126 - protein, 184 aa, Artificial Sequence; identical to SEQ ID NO: 6844
  Synthetic

SEQ ID NO: 27127 - protein, 59 aa, Artificial Sequence; identical to SEQ ID NO: 19128
  Synthetic

SEQ ID NO: 27128 - protein, 180 aa, Artificial Sequence; identical to SEQ ID NO: 12828
  Synthetic

SEQ ID NO: 27129 - protein, 59 aa, Artificial Sequence; identical to SEQ ID NO: 14436
  Synthetic

SEQ ID NO: 27130 - protein, 174 aa, Artificial Sequence; identical to SEQ ID NO: 12840
  Synthetic

SEQ ID NO: 27131 - protein, 56 aa, Artificial Sequence; identical to SEQ ID NO: 15502
  Synthetic

SEQ ID NO: 27132 - protein, 178 aa, Artificial Sequence; identical to SEQ ID NO: 12844
  Synthetic

SEQ ID NO: 27133 - protein, 55 aa, Artificial Sequence; identical to SEQ ID NO: 25128
  Synthetic

SEQ ID NO: 27134 - protein, 185 aa, Artificial Sequence; identical to SEQ ID NO: 12850
  Synthetic

SEQ ID NO: 27135 - protein, 59 aa, Artificial Sequence; identical to SEQ ID NO: 25134
  Synthetic

SEQ ID NO: 27136 - protein, 172 aa, Artificial Sequence; identical to SEQ ID NO: 12852
  Synthetic

SEQ ID NO: 27137 - protein, 56 aa, Artificial Sequence; identical to SEQ ID NO: 16914
  Synthetic

SEQ ID NO: 27138 - protein, 180 aa, Artificial Sequence; identical to SEQ ID NO: 12858
  Synthetic

SEQ ID NO: 27139 - protein, 56 aa, Artificial Sequence; identical to SEQ ID NO: 18130
  Synthetic

SEQ ID NO: 27140 - protein, 188 aa, Artificial Sequence; identical to SEQ ID NO: 554
  Synthetic

SEQ ID NO: 27141 - protein, 62 aa, Artificial Sequence; identical to SEQ ID NO: 25144
  Synthetic

SEQ ID NO: 27142 - protein, 188 aa, Artificial Sequence; identical to SEQ ID NO: 563
  Synthetic

SEQ ID NO: 27143 - protein, 62 aa, Artificial Sequence; identical to SEQ ID NO: 25144
  Synthetic

SEQ ID NO: 27144 - protein, 188 aa, Artificial Sequence; identical to SEQ ID NO: 595
  Synthetic

SEQ ID NO: 27145 - protein, 62 aa, Artificial Sequence; identical to SEQ ID NO: 25144
  Synthetic

SEQ ID NO: 27146 - protein, 176 aa, Artificial Sequence; identical to SEQ ID NO: 12874
  Synthetic

SEQ ID NO: 27147 - protein, 59 aa, Artificial Sequence; identical to SEQ ID NO: 25158
  Synthetic

SEQ ID NO: 27148 - protein, 184 aa, Artificial Sequence; identical to SEQ ID NO: 12894
  Synthetic

SEQ ID NO: 27149 - protein, 59 aa, Artificial Sequence; identical to SEQ ID NO: 25178
  Synthetic

SEQ ID NO: 27150 - protein, 176 aa, Artificial Sequence; identical to SEQ ID NO: 12902
  Synthetic

SEQ ID NO: 27151 - protein, 59 aa, Artificial Sequence; identical to SEQ ID NO: 25186
  Synthetic

SEQ ID NO: 27152 - protein, 182 aa, Artificial Sequence; identical to SEQ ID NO: 12906
  Synthetic

SEQ ID NO: 27153 - protein, 56 aa, Artificial Sequence; identical to SEQ ID NO: 25190
  Synthetic

SEQ ID NO: 27154 - protein, 186 aa, Artificial Sequence; identical to SEQ ID NO: 12908
  Synthetic

SEQ ID NO: 27155 - protein, 59 aa, Artificial Sequence; identical to SEQ ID NO: 25192
  Synthetic

SEQ ID NO: 27156 - protein, 175 aa, Artificial Sequence; identical to SEQ ID NO: 12924
  Synthetic

SEQ ID NO: 27157 - protein, 55 aa, Artificial Sequence; identical to SEQ ID NO: 25208
  Synthetic

SEQ ID NO: 27158 - protein, 180 aa, Artificial Sequence; identical to SEQ ID NO: 12962
  Synthetic

SEQ ID NO: 27159 - protein, 59 aa, Artificial Sequence; identical to SEQ ID NO: 25246
  Synthetic

SEQ ID NO: 27160 - protein, 177 aa, Artificial Sequence; identical to SEQ ID NO: 12970
  Synthetic

SEQ ID NO: 27161 - protein, 59 aa, Artificial Sequence; identical to SEQ ID NO: 24672
  Synthetic

SEQ ID NO: 27162 - protein, 184 aa, Artificial Sequence; identical to SEQ ID NO: 6844
  Synthetic

SEQ ID NO: 27163 - protein, 59 aa, Artificial Sequence; identical to SEQ ID NO: 19127
  Synthetic

SEQ ID NO: 27164 - protein, 178 aa, Artificial Sequence; identical to SEQ ID NO: 12844
  Synthetic

SEQ ID NO: 27165 - protein, 60 aa, Artificial Sequence; identical to SEQ ID NO: 25127
  Synthetic

SEQ ID NO: 27166 - protein, 185 aa, Artificial Sequence; identical to SEQ ID NO: 12850
  Synthetic

SEQ ID NO: 27167 - protein, 60 aa, Artificial Sequence; identical to SEQ ID NO: 25133
  Synthetic

SEQ ID NO: 27168 - protein, 172 aa, Artificial Sequence; identical to SEQ ID NO: 12852
  Synthetic

SEQ ID NO: 27169 - protein, 57 aa, Artificial Sequence; identical to SEQ ID NO: 25135
  Synthetic

SEQ ID NO: 27170 - protein, 180 aa, Artificial Sequence; identical to SEQ ID NO: 12858
  Synthetic

SEQ ID NO: 27171 - protein, 60 aa, Artificial Sequence; identical to SEQ ID NO: 25141
  Synthetic

SEQ ID NO: 27172 - protein, 188 aa, Artificial Sequence; identical to SEQ ID NO: 1740
  Synthetic

SEQ ID NO: 27173 - protein, 60 aa, Artificial Sequence; identical to SEQ ID NO: 19323
  Synthetic

SEQ ID NO: 27174 - protein, 188 aa, Artificial Sequence; identical to SEQ ID NO: 1911
  Synthetic

SEQ ID NO: 27175 - protein, 60 aa, Artificial Sequence; identical to SEQ ID NO: 19323
  Synthetic

SEQ ID NO: 27176 - protein, 186 aa, Artificial Sequence; identical to SEQ ID NO: 12908
  Synthetic

SEQ ID NO: 27177 - protein, 61 aa, Artificial Sequence; identical to SEQ ID NO: 25191
  Synthetic

SEQ ID NO: 27178 - protein, 247 aa, Artificial Sequence; identical to SEQ ID NO: 1129
  Synthetic

SEQ ID NO: 27179 - protein, 59 aa, Artificial Sequence; identical to SEQ ID NO: 25434
  Synthetic

SEQ ID NO: 27180 - protein, 235 aa, Artificial Sequence; identical to SEQ ID NO: 13508
  Synthetic

SEQ ID NO: 27181 - protein, 56 aa, Artificial Sequence; identical to SEQ ID NO: 25792
  Synthetic

SEQ ID NO: 27182 - protein, 238 aa, Artificial Sequence; identical to SEQ ID NO: 13970
  Synthetic

SEQ ID NO: 27183 - protein, 56 aa, Artificial Sequence; identical to SEQ ID NO: 25342
  Synthetic

SEQ ID NO: 27184 - protein, 239 aa, Artificial Sequence; identical to SEQ ID NO: 13982
  Synthetic

SEQ ID NO: 27185 - protein, 59 aa, Artificial Sequence; identical to SEQ ID NO: 26266
  Synthetic

SEQ ID NO: 27186 - protein, 244 aa, Artificial Sequence; identical to SEQ ID NO: 793
  Synthetic

SEQ ID NO: 27187 - protein, 60 aa, Artificial Sequence; identical to SEQ ID NO: 26278
  Synthetic

SEQ ID NO: 27188 - protein, 250 aa, Artificial Sequence; identical to SEQ ID NO: 1038
  Synthetic

SEQ ID NO: 27189 - protein, 59 aa, Artificial Sequence; identical to SEQ ID NO: 25380
  Synthetic

SEQ ID NO: 27190 - protein, 247 aa, Artificial Sequence; identical to SEQ ID NO: 14002
  Synthetic

SEQ ID NO: 27191 - protein, 59 aa, Artificial Sequence; identical to SEQ ID NO: 26286
  Synthetic

SEQ ID NO: 27192 - protein, 247 aa, Artificial Sequence; identical to SEQ ID NO: 896
  Synthetic

SEQ ID NO: 27193 - protein, 59 aa, Artificial Sequence; identical to SEQ ID NO: 25434
  Synthetic

SEQ ID NO: 27194 - protein, 247 aa, Artificial Sequence; identical to SEQ ID NO: 1006
  Synthetic

SEQ ID NO: 27195 - protein, 59 aa, Artificial Sequence; identical to SEQ ID NO: 25434
  Synthetic

SEQ ID NO: 27196 - protein, 247 aa, Artificial Sequence; identical to SEQ ID NO: 1114
  Synthetic

SEQ ID NO: 27197 - protein, 59 aa, Artificial Sequence; identical to SEQ ID NO: 25434
  Synthetic

SEQ ID NO: 27198 - protein, 247 aa, Artificial Sequence; identical to SEQ ID NO: 940
  Synthetic

SEQ ID NO: 27199 - protein, 59 aa, Artificial Sequence; identical to SEQ ID NO: 25434
  Synthetic

SEQ ID NO: 27200 - protein, 247 aa, Artificial Sequence; identical to SEQ ID NO: 974
  Synthetic

SEQ ID NO: 27201 - protein, 59 aa, Artificial Sequence; identical to SEQ ID NO: 25434
  Synthetic

SEQ ID NO: 27202 - protein, 247 aa, Artificial Sequence; identical to SEQ ID NO: 1042
  Synthetic

SEQ ID NO: 27203 - protein, 59 aa, Artificial Sequence; identical to SEQ ID NO: 25434
  Synthetic

SEQ ID NO: 27204 - protein, 240 aa, Artificial Sequence; identical to SEQ ID NO: 14042
  Synthetic

SEQ ID NO: 27205 - protein, 60 aa, Artificial Sequence; identical to SEQ ID NO: 25440
  Synthetic

SEQ ID NO: 27206 - protein, 248 aa, Artificial Sequence; identical to SEQ ID NO: 1045
  Synthetic

SEQ ID NO: 27207 - protein, 59 aa, Artificial Sequence; identical to SEQ ID NO: 26334
  Synthetic

SEQ ID NO: 27208 - protein, 248 aa, Artificial Sequence; identical to SEQ ID NO: 1097
  Synthetic

SEQ ID NO: 27209 - protein, 59 aa, Artificial Sequence; identical to SEQ ID NO: 26334
  Synthetic

SEQ ID NO: 27210 - protein, 248 aa, Artificial Sequence; identical to SEQ ID NO: 1160
  Synthetic

SEQ ID NO: 27211 - protein, 59 aa, Artificial Sequence; identical to SEQ ID NO: 26334
  Synthetic

SEQ ID NO: 27212 - protein, 242 aa, Artificial Sequence; identical to SEQ ID NO: 14058
  Synthetic

SEQ ID NO: 27213 - protein, 56 aa, Artificial Sequence; identical to SEQ ID NO: 26342
  Synthetic

SEQ ID NO: 27214 - protein, 231 aa, Artificial Sequence; identical to SEQ ID NO: 14078
  Synthetic

SEQ ID NO: 27215 - protein, 55 aa, Artificial Sequence; identical to SEQ ID NO: 25524
  Synthetic

SEQ ID NO: 27216 - protein, 239 aa, Artificial Sequence; identical to SEQ ID NO: 14094
  Synthetic

SEQ ID NO: 27217 - protein, 59 aa, Artificial Sequence; identical to SEQ ID NO: 26378
  Synthetic

SEQ ID NO: 27218 - protein, 241 aa, Artificial Sequence; identical to SEQ ID NO: 14102
  Synthetic

SEQ ID NO: 27219 - protein, 56 aa, Artificial Sequence; identical to SEQ ID NO: 26386
  Synthetic

SEQ ID NO: 27220 - protein, 246 aa, Artificial Sequence; identical to SEQ ID NO: 980
  Synthetic

SEQ ID NO: 27221 - protein, 55 aa, Artificial Sequence; identical to SEQ ID NO: 26402
  Synthetic

SEQ ID NO: 27222 - protein, 246 aa, Artificial Sequence; identical to SEQ ID NO: 1075
  Synthetic

SEQ ID NO: 27223 - protein, 55 aa, Artificial Sequence; identical to SEQ ID NO: 26402
  Synthetic

SEQ ID NO: 27224 - protein, 245 aa, Artificial Sequence; identical to SEQ ID NO: 14126
  Synthetic

SEQ ID NO: 27225 - protein, 59 aa, Artificial Sequence; identical to SEQ ID NO: 26410
  Synthetic

SEQ ID NO: 27226 - protein, 235 aa, Artificial Sequence; identical to SEQ ID NO: 14142
  Synthetic

SEQ ID NO: 27227 - protein, 56 aa, Artificial Sequence; identical to SEQ ID NO: 26426
  Synthetic

SEQ ID NO: 27228 - protein, 233 aa, Artificial Sequence; identical to SEQ ID NO: 14150
  Synthetic

SEQ ID NO: 27229 - protein, 59 aa, Artificial Sequence; identical to SEQ ID NO: 26434
  Synthetic

SEQ ID NO: 27230 - protein, 238 aa, Artificial Sequence; identical to SEQ ID NO: 14154
  Synthetic

SEQ ID NO: 27231 - protein, 56 aa, Artificial Sequence; identical to SEQ ID NO: 25780
  Synthetic

SEQ ID NO: 27232 - protein, 237 aa, Artificial Sequence; identical to SEQ ID NO: 14190
  Synthetic

SEQ ID NO: 27233 - protein, 59 aa, Artificial Sequence; identical to SEQ ID NO: 25896
  Synthetic

SEQ ID NO: 27234 - protein, 246 aa, Artificial Sequence; identical to SEQ ID NO: 14194
  Synthetic

SEQ ID NO: 27235 - protein, 60 aa, Artificial Sequence; identical to SEQ ID NO: 25898
  Synthetic

SEQ ID NO: 27236 - protein, 252 aa, Artificial Sequence; identical to SEQ ID NO: 14202
  Synthetic

SEQ ID NO: 27237 - protein, 60 aa, Artificial Sequence; identical to SEQ ID NO: 25950
  Synthetic

SEQ ID NO: 27238 - protein, 252 aa, Artificial Sequence; identical to SEQ ID NO: 1121
  Synthetic

SEQ ID NO: 27239 - protein, 60 aa, Artificial Sequence; identical to SEQ ID NO: 25950
  Synthetic

SEQ ID NO: 27240 - protein, 232 aa, Artificial Sequence; identical to SEQ ID NO: 14246
  Synthetic

SEQ ID NO: 27241 - protein, 56 aa, Artificial Sequence; identical to SEQ ID NO: 26068
  Synthetic

SEQ ID NO: 27242 - protein, 240 aa, Artificial Sequence; identical to SEQ ID NO: 14262
  Synthetic

SEQ ID NO: 27243 - protein, 56 aa, Artificial Sequence; identical to SEQ ID NO: 26546
  Synthetic

SEQ ID NO: 27244 - protein, 249 aa, Artificial Sequence; identical to SEQ ID NO: 992
  Synthetic

SEQ ID NO: 27245 - protein, 59 aa, Artificial Sequence; identical to SEQ ID NO: 26558
  Synthetic

SEQ ID NO: 27246 - protein, 249 aa, Artificial Sequence; identical to SEQ ID NO: 1107
  Synthetic

SEQ ID NO: 27247 - protein, 59 aa, Artificial Sequence; identical to SEQ ID NO: 26558
  Synthetic

SEQ ID NO: 27248 - protein, 249 aa, Artificial Sequence; identical to SEQ ID NO: 1122
  Synthetic

SEQ ID NO: 27249 - protein, 59 aa, Artificial Sequence; identical to SEQ ID NO: 26558
  Synthetic

SEQ ID NO: 27250 - protein, 249 aa, Artificial Sequence; identical to SEQ ID NO: 1026
  Synthetic

SEQ ID NO: 27251 - protein, 59 aa, Artificial Sequence; identical to SEQ ID NO: 26558
  Synthetic

SEQ ID NO: 27252 - protein, 249 aa, Artificial Sequence; identical to SEQ ID NO: 1168
  Synthetic

SEQ ID NO: 27253 - protein, 59 aa, Artificial Sequence; identical to SEQ ID NO: 26558
  Synthetic

SEQ ID NO: 27254 - protein, 249 aa, Artificial Sequence; identical to SEQ ID NO: 14274
  Synthetic

SEQ ID NO: 27255 - protein, 59 aa, Artificial Sequence; identical to SEQ ID NO: 26558
  Synthetic

SEQ ID NO: 27256 - protein, 243 aa, Artificial Sequence; identical to SEQ ID NO: 14286
  Synthetic

SEQ ID NO: 27257 - protein, 60 aa, Artificial Sequence; identical to SEQ ID NO: 26570
  Synthetic

SEQ ID NO: 27258 - protein, 243 aa, Artificial Sequence; identical to SEQ ID NO: 14298
  Synthetic

SEQ ID NO: 27259 - protein, 56 aa, Artificial Sequence; identical to SEQ ID NO: 26582
  Synthetic

SEQ ID NO: 27260 - protein, 232 aa, Artificial Sequence; identical to SEQ ID NO: 14302
  Synthetic

SEQ ID NO: 27261 - protein, 56 aa, Artificial Sequence; identical to SEQ ID NO: 26586
  Synthetic

SEQ ID NO: 27262 - protein, 235 aa, Artificial Sequence; identical to SEQ ID NO: 13508
  Synthetic

SEQ ID NO: 27263 - protein, 56 aa, Artificial Sequence; identical to SEQ ID NO: 25791
  Synthetic

SEQ ID NO: 27264 - protein, 239 aa, Artificial Sequence; identical to SEQ ID NO: 13982
  Synthetic

SEQ ID NO: 27265 - protein, 56 aa, Artificial Sequence; identical to SEQ ID NO: 26265
  Synthetic

SEQ ID NO: 27266 - protein, 247 aa, Artificial Sequence; identical to SEQ ID NO: 14002
  Synthetic

SEQ ID NO: 27267 - protein, 60 aa, Artificial Sequence; identical to SEQ ID NO: 26285
  Synthetic

SEQ ID NO: 27268 - protein, 247 aa, Artificial Sequence; identical to SEQ ID NO: 1366
  Synthetic

SEQ ID NO: 27269 - protein, 56 aa, Artificial Sequence; identical to SEQ ID NO: 26321
  Synthetic

SEQ ID NO: 27270 - protein, 246 aa, Artificial Sequence; identical to SEQ ID NO: 1930
  Synthetic

SEQ ID NO: 27271 - protein, 60 aa, Artificial Sequence; identical to SEQ ID NO: 26401
  Synthetic

SEQ ID NO: 27272 - protein, 235 aa, Artificial Sequence; identical to SEQ ID NO: 14142
  Synthetic

SEQ ID NO: 27273 - protein, 56 aa, Artificial Sequence; identical to SEQ ID NO: 26425
  Synthetic

SEQ ID NO: 27274 - protein, 252 aa, Artificial Sequence; identical to SEQ ID NO: 1481
  Synthetic

SEQ ID NO: 27275 - protein, 59 aa, Artificial Sequence; identical to SEQ ID NO: 26485
  Synthetic

SEQ ID NO: 27276 - protein, 249 aa, Artificial Sequence; identical to SEQ ID NO: 1624
  Synthetic

SEQ ID NO: 27277 - protein, 59 aa, Artificial Sequence; identical to SEQ ID NO: 26557
  Synthetic

SEQ ID NO: 27278 - protein, 235 aa, Artificial Sequence
  Synthetic
DEAKELLDEIRKAVKESEDRLEKLLRDYEKELRRDHMVLHEYVNAAGITLEELRRGSLDAKELLKTLEDLLREVLEVARRVVETLKELNRRVLEVVREDIEANERLLRRVLDTLRRGGVDERRIKDLERLIRESLKKAEEVLREAAEKSREIVDEIREVLKRADEALKRIIKKIRETRGADALSRLLEELLRVVDDLIRVLKELIDKSRKVIEELLELLKRINEENLKVLAEIIK

SEQ ID NO: 27279 - protein, 235 aa, Artificial Sequence
  Synthetic
DEAKELLDEIRKAVKESEDRLEKLLRDYEKELRRLEKELRDLKRRIEEKLEELRRGSLDAKELLKTLEDLLREVLEVARRVVETLKELNRRVLEVVREDIERNERLLRRVLDTLRRGGVDERRIKDLERLIRESLKKAEEVLREAAEKSREIVDEIREVLKRADEALKRIIKKIRETRGADADHMVLHEYVNAAGITIRVLKELIDKSRKVIEELLELLKRINEENLKVLAEIIK

SEQ ID NO: 27280 - protein, 235 aa, Artificial Sequence
  Synthetic
DEAKELLDEIRKAVKESEDRLEKLLRDYEKELRRLEKELRDLKRRIEEKLEELRRGSLDAKELLKTLEDLLREVLEVARRVVETLKELNRRVLEVVREDIERNERLLRRVLDTLRRGGVDERRIKDLERLIRESLKKAEEVLREAAEKSREIVDEIREVLKRADEALKRIIKKIRETRGADARDHMVLHEYVNAAGITRVLKELIDKSRKVIEELLELLKRINEENLKVLAEIIK

SEQ ID NO: 27281 - protein, 235 aa, Artificial Sequence
  Synthetic
DEAKELLDEIRKAVKESEDRLEKLLRDYEKELRRLEKELRDLKRRIEEKLEELRRGSLDAKELLKTLEDLLREVLEVARRVVETLKELNRRVLEVVREDIERNERLLRRVLDTLRRGGVDERRIKDLERLIRESLKKAEEVLREAAEKSREIVDEIREVLKRADEALKRIIKKIRETRGADALSRDHMVLHEYVNAAGITLKELIDKSRKVIEELLELLKRINEENLKVLAEIIK

SEQ ID NO: 27282 - protein, 235 aa, Artificial Sequence
  Synthetic
DEAKELLDEIRKAVKESEDRLEKLLRDYEKELRRLEKELRDLKRRIEEKLEELRRGSLDAKELLKTLEDLLREVLEVARRVVETLKELNRRVLEVVREDIERNERLLRRVLDTLRRGGVDERRIKDLERLIRESLKKAEEVLREAAEKSREIVDEIREVLKRADEALKRIIKKIRDHMVLHEYVNAAGITLRVVDDLIRVLKELIDKSRKVIEELLELLKRINEENLKVLAEIIK

SEQ ID NO: 27283 - protein, 242 aa, Artificial Sequence
  Synthetic
SEKEKLLKESEEEVRRLRRTLEELLRKYREVLERLRDHMVLHEYVNAAGITRLKEVLDRSGLDIDTIIKEVEDLLKTVLDRLRELLDKIARLTKEAIEVVREIIERIVRHAERVKDELRKGGADKRKLDRVDRLIKENTRHLKEILDRIEDLVRRSEKKLRDIIREVRRLIEELRKKAEEIKKDPDERLVKTLIEDVERVIKRILELITRVAEDNERVLERIIRELTDNLERHLKIVREIVK

SEQ ID NO: 27284 - protein, 235 aa, Artificial Sequence
  Synthetic
SEKEDLARKLRKLVEELTREYEELVKKLERLIEEIERDHMVLHEYVNAAGITISEEVRKLGTDERVLKRLLERLRRIIEEDHELNTELLKRLLDLLKEILDTSRELLKRLLDILRKGVRDEEVLRDLERTLREVLEENERAIEEAERVLRKVLEDSERAVRDARRVLAEVDKSPTGDEALRKLVELLVEVLRRLIRVNRELVKLLREVLERLLRILRESVKKLKRLIEKVIKDAT

SEQ ID NO: 27285 - protein, 235 aa, Artificial Sequence
  Synthetic
SEKEDLARKLRKLVEELTREYEELVKKLERLIEEIEKVSEESVRKLEKLLREISEEVRKLGTDERVLKRLLERLRRIIEEDHELNTELLKRLLDLLKEILDTSRELLKRLLDILRKGVRDEEVLRDLERTLREVLEENERAIEEAERVLRKVLEDSERAVRDARRVLAEVDKSPTGDEARDHMVLHEYVNAAGITRVNRELVKLLREVLERLLRILRESVKKLKRLIEKVIKDAT

SEQ ID NO: 27286 - protein, 235 aa, Artificial Sequence
  Synthetic
SEKEDLARKLRKLVEELTREYEELVKKLERLIEEIEKVSEESVRKLEKLLREISEEVRKLGTDERVLKRLLERLRRIIEEDHELNTELLKRLLDLLKEILDTSRELLKRLLDILRKGVRDEEVLRDLERTLREVLEENERAIEEAERVLRKVLEDSERAVRDARRVLAEVDKSPTGDERDHMVLHEYVNAAGITIRVNRELVKLLREVLERLLRILRESVKKLKRLIEKVIKDAT

SEQ ID NO: 27287 - protein, 235 aa, Artificial Sequence
  Synthetic
SEKEDLARKLRKLVEELTREYEELVKKLERLIEEIEKVSEESVRKLEKLLREISEEVRKLGTDERVLKRLLERLRRIIEEDHELNTELLKRLLDLLKEILDTSRELLKRLLDILRKGVRDEEVLRDLERTLREVLEENERAIEEAERVLRKVLEDSERAVRDARRVLAEVDKSPTGRDHMVLHEYVNAAGITRLIRVNRELVKLLREVLERLLRILRESVKKLKRLIEKVIKDAT

SEQ ID NO: 27288 - protein, 235 aa, Artificial Sequence
  Synthetic
SEKEDLARKLRKLVEELTREYEELVKKLERLIEEIRDHMVLHEYVNAAGITEISEEVRKLGTDERVLKRLLERLRRIIEEDHELNTELLKRLLDLLKEILDTSRELLKRLLDILRKGVRDEEVLRDLERTLREVLEENERAIEEAERVLRKVLEDSERAVRDARRVLAEVDKSPTGDEALRKLVELLVEVLRRLIRVNRELVKLLREVLERLLRILRESVKKLKRLIEKVIKDAT

SEQ ID NO: 27289 - protein, 235 aa, Artificial Sequence
  Synthetic
SEKEDLARKLRKLVEELTREYEELVKKLERLIEEIEKVSEESVRKLEKLLREISEEVRKLGTDERVLKRLLERLRRIIEEDHELNTELLKRLLDLLKEILDTSRELLKRLLDILRKGVRDEEVLRDLERTLREVLEENERAIEEAERVLRKVLEDSERAVRDARRVLAEVDKSPTRDHMVLHEYVNAAGITRRLIRVNRELVKLLREVLERLLRILRESVKKLKRLIEKVIKDAT

SEQ ID NO: 27290 - protein, 235 aa, Artificial Sequence
  Synthetic
SEKEDLARKLRKLVEELTREYEELVKKLERLIERDHMVLHEYVNAAGITLREISEEVRKLGTDERVLKRLLERLRRIIEEDHELNTELLKRLLDLLKEILDTSRELLKRLLDILRKGVRDEEVLRDLERTLREVLEENERAIEEAERVLRKVLEDSERAVRDARRVLAEVDKSPTGDEALRKLVELLVEVLRRLIRVNRELVKLLREVLERLLRILRESVKKLKRLIEKVIKDAT

SEQ ID NO: 27291 - protein, 235 aa, Artificial Sequence
  Synthetic
SEKEDLARKLRKLVEELTREYEELVKKLERLIEEIEKRDHMVLHEYVNAAGITSEEVRKLGTDERVLKRLLERLRRIIEEDHELNTELLKRLLDLLKEILDTSRELLKRLLDILRKGVRDEEVLRDLERTLREVLEENERAIEEAERVLRKVLEDSERAVRDARRVLAEVDKSPTGDEALRKLVELLVEVLRRLIRVNRELVKLLREVLERLLRILRESVKKLKRLIEKVIKDAT

SEQ ID NO: 27292 - protein, 235 aa, Artificial Sequence
  Synthetic
SEKEDLARKLRKLVEELTREYEELVKKLERLIEEIEKVSEESRDHMVLHEYVNAAGITKLGTDERVLKRLLERLRRIIEEDHELNTELLKRLLDLLKEILDTSRELLKRLLDILRKGVRDEEVLRDLERTLREVLEENERAIEEAERVLRKVLEDSERAVRDARRVLAEVDKSPTGDEALRKLVELLVEVLRRLIRVNRELVKLLREVLERLLRILRESVKKLKRLIEKVIKDAT

SEQ ID NO: 27293 - protein, 235 aa, Artificial Sequence
  Synthetic
SEKEDLARKLRKLVEELTREYEELVKKLERLIEEIEKVSEESVRDHMVLHEYVNAAGITLGTDERVLKRLLERLRRIIEEDHELNTELLKRLLDLLKEILDTSRELLKRLLDILRKGVRDEEVLRDLERTLREVLEENERAIEEAERVLRKVLEDSERAVRDARRVLAEVDKSPTGDEALRKLVELLVEVLRRLIRVNRELVKLLREVLERLLRILRESVKKLKRLIEKVIKDAT

SEQ ID NO: 27294 - protein, 242 aa, Artificial Sequence
  Synthetic
SEEEDLLERVKRVLDELIEIVDRNHELNRRVVETSAALVERLLEEVERALETLEREIPGSSLLDKAIKDLRDVLRRVKEKVKRSIEELKEVLEESRRVLEEVVRKLREVIDRVRRLVEKGVDLRDLIRELKRVLEEAVKLIERLVRLNTRAAEKDNESLRELVRAIKEALKRAVDAVRKGGLDSRAVKKLDRDHMVLHEYVNAAGITNEELWRALVELNKESVRRLREIVERVARDLEETAR

SEQ ID NO: 27295 - protein, 242 aa, Artificial Sequence
  Synthetic
SEEEDLLERVKRVLDELIEIVDRNHELNRRVVETSAALVERLLEEVERALETLEREIPGSSLLDKAIKDLRDVLRRVKEKVKRSIEELKEVLEESRRVLEEVVRKLREVIDRVRRLVEKGVDLRDLIRELKRVLEEAVKLIERLVRLNTRAAEKDNESLRELVRAIKEALKRAVDAVRKGGLDSRARDHMVLHEYVNAAGITDVVRRNEELWRALVELNKESVRRLREIVERVARDLEETAR

SEQ ID NO: 27296 - protein, 242 aa, Artificial Sequence
  Synthetic
SEEEDLLERVKRVLDELIEIVDRNHELNRRVVETSAALVERLLEEVERALETLEREIPGSSLLDKAIKDLRDVLRRVKEKVKRSIEELKEVLEESRRVLEEVVRKLREVIDRVRRLVEKGVDLRDLIRELKRVLEEAVKLIERLVRLNTRAAEKDNESLRELVRAIKEALKRAVDAVRKGGLDSRRDHMVLHEYVNAAGITEDVVRRNEELWRALVELNKESVRRLREIVERVARDLEETAR

SEQ ID NO: 27297 - protein, 242 aa, Artificial Sequence
  Synthetic
SEEEDLLERVKRVLDELIEIVDRNHELNRRVVETSAALVERLLEEVERALETLEREIPGSSLLDKAIKDLRDVLRRVKEKVKRSIEELKEVLEESRRVLEEVVRKLREVIDRVRRLVEKGVDLRDLIRELKRVLEEAVKLIERLVRLNTRAAEKDNESLRELVRAIKEALKRAVDAVRKGGLRDHMVLHEYVNAAGITKKLEDVVRRNEELWRALVELNKESVRRLREIVERVARDLEETAR

SEQ ID NO: 27298 - protein, 232 aa, Artificial Sequence
  Synthetic
DETEEVIKKIAKLIDELIETLKKIVEDSAKLIKELIDLLEEIIKRSADLIRELEKVSKRGDRDRLKKLIDRMRRETERALEELRRVIEELKEATERALKTIEDLIREIEEAIRRELGDEDLAREILEVIRRILELLREDMELNLRALEEILRLLEEVIKLNKDAIDEILELLKRDHMVLHEYVNAAGITESKKLVRDVVEEAKRLLKENRDSTRKIIEDIRRLLRKIEDSTR

SEQ ID NO: 27299 - protein, 232 aa, Artificial Sequence
  Synthetic
DETEEVIKKIAKLIDELIETLKKIVEDSAKLIKELIDLLEEIIKRSADLIRELEKVSKRGDRDRLKKLIDRMRRETERALEELRRVIEELKEATERALKTIEDLIREIEEAIRRELGDEDLAREILEVIRRILELLREDMELNLRALEEILRLLEEVIKLNKDAIDEILELLKGRDHMVLHEYVNAAGITSKKLVRDVVEEAKRLLKENRDSTRKIIEDIRRLLRKIEDSTR

SEQ ID NO: 27300 - protein, 234 aa, Artificial Sequence
  Synthetic
SKEETLRKEAEDLLRRLEELTRRLEKKARELLERAKKLSRDLARDHMVLHEYVNAAGITEELIKVLEEVAKTSIDLNKEVIDVIRRVIEESLELNKRVLDVLRRVLDIAARKGRDKKAIRDVVREAARVIKEVIDEDEKVNRDLKRVIERVIDDDRKALERLRKAVEEVASRGDDEAAKRLVEELLKAVTDLSRKNKRILEELLKAIETLSDENKKILTEILDALRRLVEKIEK

SEQ ID NO: 27301 - protein, 234 aa, Artificial Sequence
  Synthetic
SKEETLRKEAEDLLRRLEELTRRLEKKARELLERAKKLSRRDHMVLHEYVNAAGITGVPEELIKVLEEVAKTSIDLNKEVIDVIRRVIEESLELNKRVLDVLRRVLDIAARKGRDKKAIRDVVREAARVIKEVIDEDEKVNRDLKRVIERVIDDDRKALERLRKAVEEVASRGDDEAAKRLVEELLKAVTDLSRKNKRILEELLKAIETLSDENKKILTEILDALRRLVEKIEK

SEQ ID NO: 27302 - protein, 234 aa, Artificial Sequence
  Synthetic
SKEETLRKEAEDLLRRLEELTRRLEKKARELLERAKKLSRDLAEELKRLLKELREKGVPEELIKVLEEVAKTSIDLNKEVIDVIRRVIEESLELNKRVLDVLRRVLDIAARKGRDKKAIRDVVREAARVIKEVIDEDEKVNRDLKRVIERVIDDDRKALERLRKAVEEVASRGDDEARDHMVLHEYVNAAGITRKNKRILEELLKAIETLSDENKKILTEILDALRRLVEKIEK

SEQ ID NO: 27303 - protein, 234 aa, Artificial Sequence
  Synthetic
SKEETLRKEAEDLLRRLEELTRRLEKKARELLERARDHMVLHEYVNAAGITELREKGVPEELIKVLEEVAKTSIDLNKEVIDVIRRVIEESLELNKRVLDVLRRVLDIAARKGRDKKAIRDVVREAARVIKEVIDEDEKVNRDLKRVIERVIDDDRKALERLRKAVEEVASRGDDEAAKRLVEELLKAVTDLSRKNKRILEELLKAIETLSDENKKILTEILDALRRLVEKIEK

SEQ ID NO: 27304 - protein, 234 aa, Artificial Sequence
  Synthetic
SKEETLRKEAEDLLRRLEELTRRLEKKARELLERAKKLSRDHMVLHEYVNAAGITKGVPEELIKVLEEVAKTSIDLNKEVIDVIRRVIEESLELNKRVLDVLRRVLDIAARKGRDKKAIRDVVREAARVIKEVIDEDEKVNRDLKRVIERVIDDDRKALERLRKAVEEVASRGDDEAAKRLVEELLKAVTDLSRKNKRILEELLKAIETLSDENKKILTEILDALRRLVEKIEK

SEQ ID NO: 27305 - protein, 234 aa, Artificial Sequence
  Synthetic
SKEETLRKEAEDLLRRLEELTRRLEKKARELLERAKKLRDHMVLHEYVNAAGITEKGVPEELIKVLEEVAKTSIDLNKEVIDVIRRVIEESLELNKRVLDVLRRVLDIAARKGRDKKAIRDVVREAARVIKEVIDEDEKVNRDLKRVIERVIDDDRKALERLRKAVEEVASRGDDEAAKRLVEELLKAVTDLSRKNKRILEELLKAIETLSDENKKILTEILDALRRLVEKIEK

SEQ ID NO: 27306 - protein, 234 aa, Artificial Sequence
  Synthetic
SKEETLRKEAEDLLRRLEELTRRLEKKARELLERAKKLSRDLRDHMVLHEYVNAAGITPEELIKVLEEVAKTSIDLNKEVIDVIRRVIEESLELNKRVLDVLRRVLDIAARKGRDKKAIRDVVREAARVIKEVIDEDEKVNRDLKRVIERVIDDDRKALERLRKAVEEVASRGDDEAAKRLVEELLKAVTDLSRKNKRILEELLKAIETLSDENKKILTEILDALRRLVEKIEK

SEQ ID NO: 27307 - protein, 240 aa, Artificial Sequence
  Synthetic
SEREEVKEKLDRLLEEVEKTVRELKREHDELLKEVEKLVRDLKRDHMVLHEYVNAAGITKEILDVIREHVRTNKEILDRVLEVVEEHLRRNKEILDKLLDDIRKVVEDAKRILGIGDDETLRRAVRRILEELRKLVEDIRKKVKDSLETLERALEEAEERIRRSLEDLKRVLKEAKDKTKDKDRLDKVEELVKKLLEDTKRTVDRVRELVRKILKKSRETLEELERLIEKILRELEKDAR

SEQ ID NO: 27308 - protein, 240 aa, Artificial Sequence
  Synthetic
SEREEVKEKLDRLLEEVEKTVRELKREHDELLKEVEKLVRDLKKEHDELLKKVKDDGVPKEILDVIREHVRTNKEILDRVLEVVEEHLRRNKEILDKLLDDIRKVVEDAKRILGIGDDETLRRAVRRILEELRKLVEDIRKKVKDSLETLERALEEAEERIRRSLEDLKRVLKEAKDKTKDKDRDHMVLHEYVNAAGITKRTVDRVRELVRKILKKSRETLEELERLIEKILRELEKDAR

SEQ ID NO: 27309 - protein, 240 aa, Artificial Sequence
  Synthetic
SERETVKRRLEELLKEVKRTLDKLKEEHDRLLEDVRRVVEELRDHMVLHEYVNAAGITPEELLRVIAKVLETNKRILDDLLRVVKKHVDLNKEILDRILEMIKEIVERVKRVLGDGDEKTLRDKIRDIIRRLEDAAREAEERVRRSLEELKKAVEKIRKKIEDSLRELEEALKRVRDKEEDDKRLEDISRLVKRLLDESRRVLRELEETIRKRAEESKRVLEEVKRLVEKLIRELRKEAE

SEQ ID NO: 27310 - protein, 239 aa, Artificial Sequence
  Synthetic
SEDEIIKKIIEDLRRVLKEVEEIHKEVEERLDKRDHMVLHEYVNAAGITDRVLDEVKRIGDVETVLRLAIEAVRRALEIVRKVTEDLIRVVRKLLEIVDAVNKRVKKAVEDVLKLLRDTLKGSKDVERVLDEARRLLEKLHRDSRRILKRIAELLDELKELSERILERIKRLLEEVERRGSDDERLLEELIEELKDLIRRHIELLRRLIERLKELLKKHIEDLRRLLEEIEKLLEEARK

SEQ ID NO: 27311 - protein, 247 aa, Artificial Sequence
  Synthetic
SREEVLRELEEVIEDNRRLLEELIEKSKKVLDESLKLIDELLRRDHMVLHEYVNAAGITSKGDDEETARRIVTKIRKELEDVLDEVRRIVKEILDRDRRVAEDLKRVVDENLEKLKKVLDELDKKLGDRRLVEILRDIVRLLIEINERALRELLKLHEEHTRIVAELLRELERVVEELRRLVELIARGEISEDDLKRVVDEVEKKLRELKRRYKEALERIKEKIKELKDRYERAVREVVAELRKTTK

SEQ ID NO: 27312 - protein, 247 aa, Artificial Sequence
  Synthetic
SREEVLRELEEVIEDNRRLLEELIEKSKKVLDESLKLIDELLRRLEEVLERVLRLLEELSKGDDEETARRIVTKIRKELEDVLDEVRRIVKEILDRDRRVAEDLKRVVDENLEKLKKVLDELDKKLGDRRLVEILRDIVRLLIEINERALRELLKLHEEHTRIVAELLRELERVVEELRRLVELIARGEISEDDRDHMVLHEYVNAAGITRRYKEALERIKEKIKELKDRYERAVREVVAELRKTTK

SEQ ID NO: 27313 - protein, 247 aa, Artificial Sequence
  Synthetic
SREEVLRELEEVIEDNRRLLEELIEKSKKVLDESLKLIDELLRRLEEVLERVLRLLEELSKGDDEETARRIVTKIRKELEDVLDEVRRIVKEILDRDRRVAEDLKRVVDENLEKLKKVLDELDKKLGDRRLVEILRDIVRLLIEINERALRELLKLHEEHTRIVAELLRELERVVEELRRLVELIARGERDHMVLHEYVNAAGITLRELKRRYKEALERIKEKIKELKDRYERAVREVVAELRKTTK

SEQ ID NO: 27314 - protein, 230 aa, Artificial Sequence
  Synthetic
SKAEEIAEKLDRLLEENRRALEEITTRLDDLLRRDHMVLHEYVNAAGITLDDLRRGGIREELLKRIADVIRDIMRLLKELHDHTAEVIKTIKKLLKELHDINKEIIERLKRLKDGNVPKEELLKRVEELVRTSARLTTEVLKTVEKLIRDDKRLSEEILKRVKELIEELKRGVDSERVKEILERILRVVEEAVRLNEESLRRILDVVRKAVKLDRESLKKILDVVEEAVR

SEQ ID NO: 27315 - protein, 230 aa, Artificial Sequence
  Synthetic
SKAEEIAEKLDRLLEENRRALEEITTRLDDLLRRNKDALRKVMEKLKRLLDDLRRGGIREELLKRIADVIRDIMRLLKELHDHTAEVIKTIKKLLKELHDINKEIIERLKRLKDGNVPKEELLKRVEELVRTSARLTTEVLKTVEKLIRDDKRLSEEILKRVKELIEELRDHMVLHEYVNAAGITLRVVEEAVRLNEESLRRILDVVRKAVKLDRESLKKILDVVEEAVR

SEQ ID NO: 27316 - protein, 230 aa, Artificial Sequence
  Synthetic
SKAEEIAEKLDRLLEENRRALEEITTRLDDLLRRNKDRDHMVLHEYVNAAGITRRGGIREELLKRIADVIRDIMRLLKELHDHTAEVIKTIKKLLKELHDINKEIIERLKRLKDGNVPKEELLKRVEELVRTSARLTTEVLKTVEKLIRDDKRLSEEILKRVKELIEELKRGVDSERVKEILERILRVVEEAVRLNEESLRRILDVVRKAVKLDRESLKKILDVVEEAVR

SEQ ID NO: 27317 - protein, 230 aa, Artificial Sequence
  Synthetic
SKAEEIAEKLDRLLEENRRALEEITTRLDDLLRRNKDALRKVMEKLKRLLDDLRRGGIREELLKRIADVIRDIMRLLKELHDHTAEVIKTIKKLLKELHDINKEIIERLKRLKDGNVPKEELLKRVEELVRTSARLTTEVLKTVEKLIRDDKRLSEEILKRVKELIEELKRGRDHMVLHEYVNAAGITVEEAVRLNEESLRRILDVVRKAVKLDRESLKKILDVVEEAVR

SEQ ID NO: 27318 - protein, 230 aa, Artificial Sequence
  Synthetic
SKAEEIAEKLDRLLEENRRALEEITTRLDDLLRRNKRDHMVLHEYVNAAGITLRRGGIREELLKRIADVIRDIMRLLKELHDHTAEVIKTIKKLLKELHDINKEIIERLKRLKDGNVPKEELLKRVEELVRTSARLTTEVLKTVEKLIRDDKRLSEEILKRVKELIEELKRGVDSERVKEILERILRVVEEAVRLNEESLRRILDVVRKAVKLDRESLKKILDVVEEAVR

SEQ ID NO: 27319 - protein, 230 aa, Artificial Sequence
  Synthetic
SKAEEIAEKLDRLLEENRRALEEITTRLDDLLRRNKDALRDHMVLHEYVNAAGITGGIREELLKRIADVIRDIMRLLKELHDHTAEVIKTIKKLLKELHDINKEIIERLKRLKDGNVPKEELLKRVEELVRTSARLTTEVLKTVEKLIRDDKRLSEEILKRVKELIEELKRGVDSERVKEILERILRVVEEAVRLNEESLRRILDVVRKAVKLDRESLKKILDVVEEAVR

SEQ ID NO: 27320 - protein, 243 aa, Artificial Sequence
  Synthetic
SRVEELKKLIEDILRISREVVERIKRVAEDIHRINRRVLDDLRKLIEDILRTVEEILARKVGDTEIAERLRDTIARVVDEIAKLLEEHEKRSRELLEEIRKLLEDILRRSERAVEEIRELLKKGVSTKDVLRIIEEILREHLELLERVVRRIEEILRELLKTIEEIVKRIKEILEELKEVLKRGRVKDDEVERDHMVLHEYVNAAGITYRRLLEEIKRKLEEILRRVEELHRRLRRKLEEIDR

SEQ ID NO: 27321 - protein, 243 aa, Artificial Sequence
  Synthetic
SRVEELKKLIEDILRISREVVERIKRVAEDIHRINRRVRDHMVLHEYVNAAGITEILARKVGDTEIAERLRDTIARVVDEIAKLLEEHEKRSRELLEEIRKLLEDILRRSERAVEEIRELLKKGVSTKDVLRIIEEILREHLELLERVVRRIEEILRELLKTIEEIVKRIKEILEELKEVLKRGRVKDDEVEREIRRVKEDLDRILEEYRRLLEEIKRKLEEILRRVEELHRRLRRKLEEIDR

SEQ ID NO: 27322 - protein, 58 aa, Artificial Sequence; identical to SEQ ID NO: 26719
  Synthetic

SEQ ID NO: 27323 - protein, 58 aa, Artificial Sequence
  Synthetic
RGADALSRLLEELLRVVDDLIRVLKELIDKSRKVIEELLELLKRINEENLKVLAEIIK

SEQ ID NO: 27324 - protein, 58 aa, Artificial Sequence; identical to SEQ ID NO: 26723
  Synthetic

SEQ ID NO: 27325 - protein, 58 aa, Artificial Sequence; identical to SEQ ID NO: 26720
  Synthetic

SEQ ID NO: 27326 - protein, 58 aa, Artificial Sequence; identical to SEQ ID NO: 26703
  Synthetic

SEQ ID NO: 27327 - protein, 58 aa, Artificial Sequence; identical to SEQ ID NO: 26710
  Synthetic

SEQ ID NO: 27328 - protein, 58 aa, Artificial Sequence
  Synthetic
SDERRIAERIRELLRESKKLVRDVVEEAKRLLKENRDSTRKIIEDIRRLLRKIEDSTR

SEQ ID NO: 27329 - protein, 58 aa, Artificial Sequence; identical to SEQ ID NO: 26725
  Synthetic

SEQ ID NO: 27330 - protein, 58 aa, Artificial Sequence; identical to SEQ ID NO: 26705
  Synthetic

SEQ ID NO: 27331 - protein, 58 aa, Artificial Sequence; identical to SEQ ID NO: 26740
  Synthetic

SEQ ID NO: 27332 - protein, 58 aa, Artificial Sequence; identical to SEQ ID NO: 26711
  Synthetic

SEQ ID NO: 27333 - protein, 58 aa, Artificial Sequence; identical to SEQ ID NO: 26737
  Synthetic

SEQ ID NO: 27334 - protein, 58 aa, Artificial Sequence; identical to SEQ ID NO: 26721
  Synthetic

SEQ ID NO: 27335 - protein, 58 aa, Artificial Sequence; identical to SEQ ID NO: 26741
  Synthetic

SEQ ID NO: 27336 - protein, 58 aa, Artificial Sequence
  Synthetic
ISEDDLKRVVDEVEKKLRELKRRYAEALERIKEKIKELKDRYERAVREVVAELRKTTK

SEQ ID NO: 27337 - protein, 58 aa, Artificial Sequence; identical to SEQ ID NO: 26722
  Synthetic

SEQ ID NO: 27338 - protein, 58 aa, Artificial Sequence
  Synthetic
VDSERVKEILERILRVVEEAVRLNEESLRRILDVVRKAVKLDRESLKKILDVVEEAVR

SEQ ID NO: 27339 - protein, 58 aa, Artificial Sequence
  Synthetic
VKDDEVEREIRRVKEDLDRILEEYRRLLEEIKRKLEEILRRVEELHRRLRRKLEEIDR

SEQ ID NO: 27340 - protein, 58 aa, Artificial Sequence; identical to SEQ ID NO: 26731
  Synthetic

SEQ ID NO: 27341 - protein, 58 aa, Artificial Sequence; identical to SEQ ID NO: 27323
  Synthetic

SEQ ID NO: 27342 - protein, 58 aa, Artificial Sequence; identical to SEQ ID NO: 27323
  Synthetic

SEQ ID NO: 27343 - protein, 58 aa, Artificial Sequence; identical to SEQ ID NO: 26703
  Synthetic

SEQ ID NO: 27344 - protein, 58 aa, Artificial Sequence; identical to SEQ ID NO: 26720
  Synthetic

SEQ ID NO: 27345 - protein, 58 aa, Artificial Sequence; identical to SEQ ID NO: 26720
  Synthetic

SEQ ID NO: 27346 - protein, 58 aa, Artificial Sequence; identical to SEQ ID NO: 26720
  Synthetic

SEQ ID NO: 27347 - protein, 58 aa, Artificial Sequence; identical to SEQ ID NO: 26710
  Synthetic

SEQ ID NO: 27348 - protein, 58 aa, Artificial Sequence; identical to SEQ ID NO: 26710
  Synthetic

SEQ ID NO: 27349 - protein, 58 aa, Artificial Sequence; identical to SEQ ID NO: 26710
  Synthetic

SEQ ID NO: 27350 - protein, 58 aa, Artificial Sequence; identical to SEQ ID NO: 27328
  Synthetic

SEQ ID NO: 27351 - protein, 58 aa, Artificial Sequence; identical to SEQ ID NO: 26725
  Synthetic

SEQ ID NO: 27352 - protein, 58 aa, Artificial Sequence; identical to SEQ ID NO: 26725
  Synthetic

SEQ ID NO: 27353 - protein, 58 aa, Artificial Sequence; identical to SEQ ID NO: 26725
  Synthetic

SEQ ID NO: 27354 - protein, 58 aa, Artificial Sequence; identical to SEQ ID NO: 27336
  Synthetic

SEQ ID NO: 27355 - protein, 58 aa, Artificial Sequence; identical to SEQ ID NO: 26722
  Synthetic

SEQ ID NO: 27356 - protein, 58 aa, Artificial Sequence; identical to SEQ ID NO: 27338
  Synthetic

SEQ ID NO: 27357 - protein, 58 aa, Artificial Sequence; identical to SEQ ID NO: 26722
  Synthetic

SEQ ID NO: 27358 - protein, 58 aa, Artificial Sequence; identical to SEQ ID NO: 26722
  Synthetic

SEQ ID NO: 27359 - protein, 288 aa, Artificial Sequence
  Synthetic peptide
  MISC_FEATURE (259)..(288): Optional residues
SELARKLLEASTKLQRLNIRLAEALLEAIARLQELNLELVYLAVELTDPKRIRDEIKEVKDKSKEIIRRAEKEIDDAAKESEKILEEAREAISGSGSELAKLLLKAIAETQDLNLRAAKAFLEAAAKLQELNIRAVELLVKLTDPATIREALEHAKRRSKEIIDEAERAIRAAKRESERIIEEARRLIEKGSGSGSELARELLRAHAQLQRLNLELLRELLRALAQLQELNLDLLRLASELTDEIWIAQELRRIGDEFNAYYADAERLIREAAAASEKISREAERLIR

SEQ ID NO: 27360 - protein, 284 aa, Artificial Sequence
  Synthetic peptide
  MISC_FEATURE (242)..(284): Optional residues
SELARKLLEASTKLQRLNIRLAEALLEAIARLQELNLELVYLAVELTDPKRIRDEIKEVKDKSKEIIRRAEKEIDDAAKESEKILEEAREAISGSGSELAKLLLKAIAETQDLNLRAAKAFLEAAAKLQELNIRAVELLVKLTDPATIREALEHAKRRSKEIIDEAERAIRAAKRESERIIEEARRLIEKGSGSGSELARELLRAHAQLQRLNLELLRELLRALAQLQELNLDLLRLASELRDHMVLHEYVNAAGITFNAYYADAERLIREAAAASEKISREAG

SEQ ID NO: 27361 - protein, 288 aa, Artificial Sequence
  Synthetic peptide
  MISC_FEATURE (242)..(288): Optional residues
SELARKLLEASTKLQRLNIRLAEALLEAIARLQELNLELVYLAVELTDPKRIRDEIKEVKDKSKEIIRRAEKEIDDAAKESEKILEEAREAISGSGSELAKLLLKAIAETQDLNLRAAKAFLEAAAKLQELNIRAVELLVKLTDPATIREALEHAKRRSKEIIDEAERAIRAAKRESERIIEEARRLIEKGSGSGSELARELLRAHAQLQRLNLELLRELLRALAQLQELNLDLLRLASELRDHMVLHEYVNAAGITFNAYYADAERLIREAAAASEKISREAERLIR

SEQ ID NO: 27362 - protein, 288 aa, Artificial Sequence
  Synthetic peptide
  MISC_FEATURE (242)..(288): Optional residues
SELARKLLEASTKLQRLNIRLAEALLEAIARLQELNLELVYLAVELTDPKRIRDEIKEVKDKSKEIIRRAEKEIDDAAKESEKILEEAREAISGSGSELAKLLLKAIAETQDLNLRAAKAFLEAAAKLQELNIRAVELLVKLTDPATIREALEHAKRRSKEIIDEAERAIRAAKRESERIIEEARRLIEKGSGSGSELARELLRAHAQLQRLNLELLRELLRALAQLQELNLDLLRLASELTDPDEARKAIARVKRESNAYYADAERLIREAAAASEKISREAERLIR

SEQ ID NO: 27363 - protein, 289 aa, Artificial Sequence
  Synthetic peptide
  MISC_FEATURE (243)..(289)
SELARKLLEASTKLQRLNIRLAEALLEAIARLQELNLELVYLAVELTDPKRIRDEIKEVKDKSKEIIRRAEKEIDDAAKESEKILEEAREAISGSGSELAKLLLKAIAETQDLNLRAAKAFLEAAAKLQELNIRAVELLVKLTDPATIREALEHAKRRSKEIIDEAERAIRAAKRESERIIEEARRLIEKGSGSGSELARELLRAHAQLQRLNLELLRELLRALAQLQELNLDLLRLASELGTDPDEARKAIARVKRESNAYYADAERLIREAAAASEKISREAERLIR

SEQ ID NO: 27364 - protein, 284 aa, Artificial Sequence; identical to SEQ ID NO: 27360
  Synthetic peptide
  MISC_FEATURE (242)..(284): Optional residues

SEQ ID NO: 27365 - protein, 288 aa, Artificial Sequence
  Synthetic peptide
  MISC_FEATURE (242)..(288): Optional residues
SELARKLLEASTKLQRLNIRLAEALLEAIARLQELNLELVYLAVELTDPKRIRDEIKEVKDKSKEIIRRAEKEIDDAAKESEKILEEAREAISGSGSELAKLLLKAIAETQDLNLRAAKAFLEAAAKLQELNIRAVELLVKLTDPATIREALEHAKRRSKEIIDEAERAIRAAKRESERIIEEARRLIEKGSGSGSELARELLRAHAQLQRLNLELLRELLRALAQLQELNLDLLRLASELTDEIWIAQELRRIGDEFNAYYADAERLIREAAAASEKISREAERLAR

SEQ ID NO: 27366 - protein, 288 aa, Artificial Sequence
  Synthetic peptide
  MISC_FEATURE (242)..(288): Optional residues
SELARKLLEASTKLQRLNIRLAEALLEAIARLQELNLELVYLAVELTDPKRIRDEIKEVKDKSKEIIRRAEKEIDDAAKESEKILEEAREAISGSGSELAKLLLKAIAETQDLNLRAAKAFLEAAAKLQELNIRAVELLVKLTDPATIREALEHAKRRSKEIIDEAERAIRAAKRESERIIEEARRLIEKGSGSGSELARELLRAHAQLQRLNLELLRELLRALAQLQELNLDLLRLASELTDEIWIAQELRRIGDEFNAYYADAERLSREAAAASEKISREAERLIR

SEQ ID NO: 27367 - protein, 288 aa, Artificial Sequence; identical to SEQ ID NO: 27366
  Synthetic peptide

SEQ ID NO: 27368 - protein, 288 aa, Artificial Sequence
  Synthetic peptide
  MISC_FEATURE (242)..(288): Optional residues
SELARKLLEASTKLQRLNIRLAEALLEAIARLQELNLELVYLAVELTDPKRIRDEIKEVKDKSKEIIRRAEKEIDDAAKESEKILEEAREAISGSGSELAKLLLKAIAETQDLNLRAAKAFLEAAAKLQELNIRAVELLVKLTDPATIREALEHAKRRSKEIIDEAERAIRAAKRESERIIEEARRLIEKGSGSGSELARELLRAHAQAQRLNLELLRELLRALAQLQELNLDLLRLASELTDEIWIAQELRRIGDEFNAYYADAERLIREAAAASEKISREAERLIR

SEQ ID NO: 27369 - protein, 285 aa, Artificial Sequence
  Synthetic peptide
  MISC_FEATURE (242)..(285): Optional residues
SELARKLLEASTKLQRLNIRLAEALLEAIARLQELNLELVYLAVELTDPKRIRDEIKEVKDKSKEIIRRAEKEIDDAAKESEKILEEAREAISGSGSELAKLLLKAIAETQDLNLRAAKAFLEAAAKLQELNIRAVELLVKLTDPATIREALEHAKRRSKEIIDEAERAIRAAKRESERIIEEARRLIEKGSGSGSELARELLRAHAQLQRLNLELLRELLRALAQLQELNLDLLRLASELRDHMVLHEYVNAAGITFNAYYADAERLIREAAAASEKISREAER

SEQ ID NO: 27370 - protein, 288 aa, Artificial Sequence
  Synthetic peptide
  MISC_FEATURE (242)..(288): Optional residues
SELARKLLEASTKLQRLNIRLAEALLEAIARLQELNLELVYLAVELTDPKRIRDEIKEVKDKSKEIIRRAEKEIDDAAKESEKILEEAREAISGSGSELAKLLLKAIAETQDLNLRAAKAFLEAAAKLQELNIRAVELLVKLTDPATIREALEHAKRRSKEIIDEAERAIRAAKRESERIIEEARRLIEKGSGSGSELARELLRAHAQLQRLNLELLRELLRALAQLQELNLDLLRLASELTDPDEARKAIARVKRESNAYYADAERLSREAAAASEKISREAERLIR

SEQ ID NO: 27371 - protein, 288 aa, Artificial Sequence; identical to SEQ ID NO: 27362
  Synthetic peptide
  MISC_FEATURE (242)..(288): Optional residues

SEQ ID NO: 27372 - protein, 288 aa, Artificial Sequence
  Synthetic peptide
  MISC_FEATURE (242)..(288): Optional residues
SELARKLLEASTKLQRLNIRLAEALLEAIARLQELNLELVYLAVELTDPKRIRDEIKEVKDKSKEIIRRAEKEIDDAAKESEKILEEAREAISGSGSELAKLLLKAIAETQDLNLRAAKAFLEAAAKLQELNIRAVELLVKLTDPATIREALEHAKRRSKEIIDEAERAIRAAKRESERIIEEARRLIEKGSGSGSELARELLRAHAQLQRLNLELLRELLRALAQLQELNLDLLRLASELTDEIWIAQELRRIGDEFNAYYADAERLIREAAAASEKISREAERLSR

SEQ ID NO: 27373 - protein, 288 aa, Artificial Sequence
  Synthetic peptide
  MISC_FEATURE (242)..(288): Optional residues
SELARKLLEASTKLQRLNIRLAEALLEAIARLQELNLELVYLAVELTDPKRIRDEIKEVKDKSKEIIRRAEKEIDDAAKESEKILEEAREAISGSGSELAKLLLKAIAETQDLNLRAAKAFLEAAAKLQELNIRAVELLVKLTDPATIREALEHAKRRSKEIIDEAERAIRAAKRESERIIEEARRLIEKGSGSGSELARELLRAHAQLQRLNLELLRELLRALAQLQELNLDLLRLASELTDEIWIAQELRRIGDEFNAYYADAERLSREAAAASEKISREAERLAR

SEQ ID NO: 27374 - protein, 288 aa, Artificial Sequence
  Synthetic peptide
  MISC_FEATURE (242)..(288): Optional residues
SELARKLLEASTKLQRLNIRLAEALLEAIARLQELNLELVYLAVELTDPKRIRDEIKEVKDKSKEIIRRAEKEIDDAAKESEKILEEAREAISGSGSELAKLLLKAIAETQDLNLRAAKAFLEAAAKLQELNIRAVELLVKLTDPATIREALEHAKRRSKEIIDEAERAIRAAKRESERIIEEARRLIEKGSGSGSELARELLRAHAQLQRLNLELLRELLRALAQLQELNLDLLRLASELTDEIWIAQELRRIGDEFNAYYADAERLSREAAAASEKISREAERLSR

SEQ ID NO: 27375 - protein, 288 aa, Artificial Sequence
  Synthetic peptide
  MISC_FEATURE (242)..(288): Optional residues
SELARKLLEASTKLQRLNIRLAEALLEAIARLQELNLELVYLAVELTDPKRIRDEIKEVKDKSKEIIRRAEKEIDDAAKESEKILEEAREAISGSGSELAKLLLKAIAETQDLNLRAAKAFLEAAAKLQELNIRAVELLVKLTDPATIREALEHAKRRSKEIIDEAERAIRAAKRESERIIEEARRLIEKGSGSGSELARELLRAHAQAQRLNLEALRELLRALAQLQELNLDLLRLASELTDEIWIAQELRRIGDEFNAYYADAERLIREAAAASEKISREAERLIR

SEQ ID NO: 27376 - protein, 284 aa, Artificial Sequence; identical to SEQ ID NO: 27360
  Synthetic peptide
  MISC_FEATURE (242)..(284): Optional residues

SEQ ID NO: 27377 - protein, 285 aa, Artificial Sequence
  Synthetic peptide
  MISC_FEATURE (242)..(285): Optional residues
SELARKLLEASTKLQRLNIRLAEALLEAIARLQELNLELVYLAVELTDPKRIRDEIKEVKDKSKEIIRRAEKEIDDAAKESEKILEEAREAISGSGSELAKLLLKAIAETQDLNLRAAKAFLEAAAKLQELNIRAVELLVKLTDPATIREALEHAKRRSKEIIDEAERAIRAAKRESERIIEEARRLIEKGSGSGSELARELLRAHAQLQRLNLELLRELLRALAQLQELNLDLLRLASELGRDHMVLHEYVNAAGITFNAYYADAERLIREAAAASEKISREAG

SEQ ID NO: 27378 - protein, 284 aa, Artificial Sequence
  Synthetic peptide
  MISC_FEATURE (242)..(284): Optional residues
SELARKLLEASTKLQRLNIRLAEALLEAIARLQELNLELVYLAVELTDPKRIRDEIKEVKDKSKEIIRRAEKEIDDAAKESEKILEEAREAISGSGSELAKLLLKAIAETQDLNLRAAKAFLEAAAKLQELNIRAVELLVKLTDPATIREALEHAKRRSKEIIDEAERAIRAAKRESERIIEEARRLIEKGSGSGSELARELLRAHAQLQRLNLELLRELLRALAQLQELNLDLLRLASELRDHMVLHEYVNAAGITFNAYYADAERLSREAAAASEKISREAG

SEQ ID NO: 27379 - protein, 285 aa, Artificial Sequence
  Synthetic peptide
  MISC_FEATURE (242)..(285): Optional residues
SELARKLLEASTKLQRLNIRLAEALLEAIARLQELNLELVYLAVELTDPKRIRDEIKEVKDKSKEIIRRAEKEIDDAAKESEKILEEAREAISGSGSELAKLLLKAIAETQDLNLRAAKAFLEAAAKLQELNIRAVELLVKLTDPATIREALEHAKRRSKEIIDEAERAIRAAKRESERIIEEARRLIEKGSGSGSELARELLRAHAQLQRLNLELLRELLRALAQLQELNLDLLRLASELGTDPDEARKAIARVKRESNAYYADAERLSREAAAASEKISREAG

SEQ ID NO: 27380 - protein, 286 aa, Artificial Sequence
  Synthetic peptide
  MISC_FEATURE (242)..(286): Optional residues
SELARKLLEASTKLQRLNIRLAEALLEAIARLQELNLELVYLAVELTDPKRIRDEIKEVKDKSKEIIRRAEKEIDDAAKESEKILEEAREAISGSGSELAKLLLKAIAETQDLNLRAAKAFLEAAAKLQELNIRAVELLVKLTDPATIREALEHAKRRSKEIIDEAERAIRAAKRESERIIEEARRLIEKGSGSGSELARELLRAHAQLQRLNLELLRELLRALAQLQELNLDLLRLASELGTDPDEARKAIARVKRESNAYYADAERLSREAAAASEKISREAER

SEQ ID NO: 27381 - protein, 288 aa, Artificial Sequence
  Synthetic peptide
  MISC_FEATURE (242)..(288): Optional residues
SELARKLLEASTKLQRLNIRLAEALLEAIARLQELNLELVYLAVELTDPKRIRDEIKEVKDKSKEIIRRAEKEIDDAAKESEKILEEAREAISGSGSELAKLLLKAIAETQDLNLRAAKAFLEAAAKLQELNIRAVELLVKLTDPATIREALEHAKRRSKEIIDEAERAIRAAKRESERIIEEARRLIEKGSGSGSELARELLRAHAQLQRLNLELLRELLRALAQLQELNLDLLRLASELGTDPDEARKAIARVKRESNAYYADAERLSREAAAASEKISREAERLI

SEQ ID NO: 27382 - protein, 289 aa, Artificial Sequence
  Synthetic peptide
  MISC_FEATURE (242)..(289): Optional residues
SELARKLLEASTKLQRLNIRLAEALLEAIARLQELNLELVYLAVELTDPKRIRDEIKEVKDKSKEIIRRAEKEIDDAAKESEKILEEAREAISGSGSELAKLLLKAIAETQDLNLRAAKAFLEAAAKLQELNIRAVELLVKLTDPATIREALEHAKRRSKEIIDEAERAIRAAKRESERIIEEARRLIEKGSGSGSELARELLRAHAQLQRLNLELLRELLRALAQLQELNLDLLRLASELGTDPDEARKAIARVKRESNAYYADAERLSREAAAASEKISREAERLIR

SEQ ID NO: 27383 - protein, 289 aa, Artificial Sequence; identical to SEQ ID NO: 27363
  Synthetic peptide
  MISC_FEATURE (242)..(289): Optional residues

SEQ ID NO: 27384 - protein, 289 aa, Artificial Sequence
  Synthetic peptide
  MISC_FEATURE (242)..(289): Optional residues
SELARKLLEASTKLQRLNIRLAEALLEAIARLQELNLELVYLAVELTDPKRIRDEIKEVKDKSKEIIRRAEKEIDDAAKESEKILEEAREAISGSGSELAKLLLKAIAETQDLNLRAAKAFLEAAAKLQELNIRAVELLVKLTDPATIREALEHAKRRSKEIIDEAERAIRAAKRESERIIEEARRLIEKGSGSGSELARELLRAHAQLQRLNLELLRELLRALAQLQELNLDLLRLASELGTDPDEARKAIARVKRESNAYYADAERLSREAAAASEKISREAERLAR

SEQ ID NO: 27385 - protein, 289 aa, Artificial Sequence
  Synthetic peptide
  MISC_FEATURE (284)..(289): Optional residues
SELARKLLEASTKLQRLNIRLAEALLEAIARLQELNLELVYLAVELTDPKRIRDEIKEVKDKSKEIIRRAEKEIDDAAKESEKILEEAREAISGSGSELAKLLLKAIAETQDLNLRAAKAFLEAAAKLQELNIRAVELLVKLTDPATIREALEHAKRRSKEIIDEAERAIRAAKRESERIIEEARRLIEKGSGSGSELARELLRAHAQLQRLNLELLRELLRALAQLQELNLDLLRLASELGTDPDEARKAIARVKRESNAYYADAERLIREAAAASEKISREAERLAR

SEQ ID NO: 27386 - protein, 288 aa, Artificial Sequence
  Synthetic peptide
  MISC_FEATURE (242)..(288): Optional residues
SELARKLLEASTKLQRLNIRLAEALLEAIARLQELNLELVYLAVELTDPKRIRDEIKEVKDKSKEIIRRAEKEIDDAAKESEKILEEAREAISGSGSELAKLLLKAIAETQDLNLRAAKAFLEAAAKLQELNIRAVELLVKLTDPATIREALEHAKRRSKEIIDEAERAIRAAKRESERIIEEARRLIEKGSGSGSELARELLRAHAQLQRLNLELLRELLRALAQLQELNLDLLRLASELTDPDEARKAIARVKRESNAYYADAERLSREAAAASEKISREAERLAR

SEQ ID NO: 27387 - protein, 298 aa, Artificial Sequence
  Synthetic peptide
  MISC_FEATURE (242)..(298): Optional residues
  MISC_FEATURE (245)..(245): Xaa is D or N
SELARKLLEASTKLQRLNIRLAEALLEAIARLQELNLELVYLAVELTDPKRIRDEIKEVKDKSKEIIRRAEKEIDDAAKESEKILEEAREAISGSGSELAKLLLKAIAETQDLNLRAAKAFLEAAAKLQELNIRAVELLVKLTDPATIREALEHAKRRSKEIIDEAERAIRAAKRESERIIEEARRLIEKGSGSGSELARELLRAHAQLQRLNLELLRELLRALAQLQELNLDLLRLASELGSEXLYFQGSTDPDEARKAIARVKRESNAYYADAERLSREAAAASEKISREAERLAR

SEQ ID NO: 27388 - protein, 298 aa, Artificial Sequence
  Synthetic peptide
  MISC_FEATURE (242)..(298): Optional residues
  MISC_FEATURE (245)..(245): Xaa is D or N
SELARKLLEASTKLQRLNIRLAEALLEAIARLQELNLELVYLAVELTDPKRIRDEIKEVKDKSKEIIRRAEKEIDDAAKESEKILEEAREAISGSGSELAKLLLKAIAETQDLNLRAAKAFLEAAAKLQELNIRAVELLVKLTDPATIREALEHAKRRSKEIIDEAERAIRAAKRESERIIEEARRLIEKGSGSGSELARELLRAHAQLQRLNLELLRELLRALAQLQELNLDLLRLASELGSEXLYFQGSTDPDEARKAIARVKRESNAYYADAERLSREAAAASEKISREAERLIR

SEQ ID NO: 27389 - protein, 298 aa, Artificial Sequence
  Synthetic peptide
  MISC_FEATURE (242)..(298): Optional residues
  MISC_FEATURE (245)..(245): Xaa is D or N
SELARKLLEASTKLQRLNIRLAEALLEAIARLQELNLELVYLAVELTDPKRIRDEIKEVKDKSKEIIRRAEKEIDDAAKESEKILEEAREAISGSGSELAKLLLKAIAETQDLNLRAAKAFLEAAAKLQELNIRAVELLVKLTDPATIREALEHAKRRSKEIIDEAERAIRAAKRESERIIEEARRLIEKGSGSGSELARELLRAHAQLQRLNLELLRELLRALAQLQELNLDLLRLASELGSEXLYFQGSTDPDEARKAIARVKRESNAYYADAERLIREAAAASEKISREAERLAR

SEQ ID NO: 27390 - protein, 298 aa, Artificial Sequence
  Synthetic peptide
  MISC_FEATURE (242)..(298): Optional residues
  MISC_FEATURE (245)..(245): Xaa is D or N
SELARKLLEASTKLQRLNIRLAEALLEAIARLQELNLELVYLAVELTDPKRIRDEIKEVKDKSKEIIRRAEKEIDDAAKESEKILEEAREAISGSGSELAKLLLKAIAETQDLNLRAAKAFLEAAAKLQELNIRAVELLVKLTDPATIREALEHAKRRSKEIIDEAERAIRAAKRESERIIEEARRLIEKGSGSGSELARELLRAHAQLQRLNLELLRELLRALAQLQELNLDLLRLASELGSEXLYFQGSTDPDEARKAIARVKRESNAYYADAERLIREAAAASEKISREAERLIR

SEQ ID NO: 27391 - protein, 289 aa, Artificial Sequence
  Synthetic peptide
  MISC_FEATURE (242)..(289): Optional residues
SELARKLLEASTKLQRLNIRLAEALLEAIARLQELNLELVYLAVELTDPKRIRDEIKEVKDKSKEIIRRAEKEIDDAAKESEKILEEAREAISGSGSELAKLLLKAIAETQDLNLRAAKAFLEAAAKLQELNIRAVELLVKLTDPATIREALEHAKRRSKEIIDEAERAIRAAKRESERIIEEARRLIEKGSGSGSELARELLRAHAQLQRLNLELLRELLRALAQLQELNLDLLRLASELGTDPDEARKAIARVKRESNAYYADAERLSREAAAASEKISREAERLSR

SEQ ID NO: 27392 - protein, 289 aa, Artificial Sequence
  Synthetic peptide
  MISC_FEATURE (242)..(289): Optional residues
SELARKLLEASTKLQRLNIRLAEALLEAIARLQELNLELVYLAVELTDPKRIRDEIKEVKDKSKEIIRRAEKEIDDAAKESEKILEEAREAISGSGSELAKLLLKAIAETQDLNLRAAKAFLEAAAKLQELNIRAVELLVKLTDPATIREALEHAKRRSKEIIDEAERAIRAAKRESERIIEEARRLIEKGSGSGSELARELLRAHAQLQRLNLEALRELLRALAQLQELNLDLLRLASELGTDPDEARKAIARVKRESNAYYADAERLSREAAAASEKISREAERLIR

SEQ ID NO: 27393 - protein, 44 aa, Artificial Sequence
  Synthetic peptide
  MISC_FEATURE (1)..(9): Optional residues
  MISC_FEATURE (38)..(44): Optional residues
DEARKAIARVKRESKRIVEDAERLIREAAAASEKISREAERLIR

SEQ ID NO: 27394 - protein, 41 aa, Artificial Sequence
  Synthetic peptide
DEAIARVKRESKRIVEDAERLIREAAAASEKISREAERLIR

SEQ ID NO: 27395 - protein, 37 aa, Artificial Sequence
  Synthetic peptide
DEVKRESKRIVEDAERLIREAAAASEKISREAERLIR

SEQ ID NO: 27396 - protein, 41 aa, Artificial Sequence
  Synthetic peptide
DEARKAIARVKRESKRIVEDAERLIREAAAASEKISREAER

SEQ ID NO: 27397 - protein, 37 aa, Artificial Sequence
  Synthetic peptide
DEARKAIARVKRESKRIVEDAERLIREAAAASEKISR

SEQ ID NO: 27398 - protein, 44 aa, Artificial Sequence
  Synthetic peptide
DEARKAIARVKRESKRIVEDAERLIREAAAASEKSSREAERLAR

SEQ ID NO: 27399 - protein, 124 aa, Artificial Sequence
  Synthetic peptide
DLGKKLLEAARAGQDDEVRILMANGADVNAKDEYGLTPLYLATAHGHLEIVEVLLKNGADVNAVDAIGFTPLHLAAFIGHLEIAEVLLKHGADVNAQDKFGKTAFDISIGNGNEDLAEILQKLN

SEQ ID NO: 27400 - protein, 156 aa, Artificial Sequence
  Synthetic peptide
DLGKKLLEAARAGQDDEVRILMANGADVNADDTWGWTPLHLAAYQGHLEIVEVLLKNGADVNAYDYIGWTPLHLAADGHLEIVEVLLKNGADVNASDYIGDTPLHLAAHNGHLEIVEVLLKHGADVNAQDKFGKTAFDISIDNGNEDLAEILQKLN

SEQ ID NO: 27401 - protein, 158 aa, Artificial Sequence
  Synthetic peptide
DLGKKLLEAARAGQDDEVRILVANGADVNAYFGTTPLHLAAAHGRLEIVEVLLKNGADVNAQDVWGITPLHLAAYNGHLEIVEVLLKYGADVNAHDTRGWTPLHLAAINGHLEIVEVLLKNVADVNAQDRSGKTPFDLAIDNGNEDIAEVLQKAAKLN

SEQ ID NO: 27402 - protein, 243 aa, Artificial Sequence
  Synthetic peptide
DIQMTQSPSSLSASVGDRVTITCRASQDVNTAVAWYQQKPGKAPKLLIYSASFLYSGVPSRFSGSRSGTDFTLTISSLQPEDFATYYCQQHYTTPPTFGQGTKVEIKGSTSGSGKPGSGEGSGEVQLVESGGGLVQPGGSLRLSCAASGFNIKDTYIHWVRQAPGKGLEWVARIYPTNGYTRYADSVKGRFTISADTSKNTAYLQMNSLRAEDTAVYYCSRWGGDGFYAMDYWGQGTLVTVSS

SEQ ID NO: 27403 - protein, 243 aa, Artificial Sequence
  Synthetic peptide
QVQLKQSGPGLVQPSQSLSITCTVSGFSLTNYGVHWVRQSPGKGLEWLGVIWSGGNTDYNTPFTSRLSINKDNSKSQVFFKMNSLQSNDTAIYYCARALTYYDYEFAYWGQGTLVTVSAGGGGSGGGGSGGGGSDILLTQSPVILSVSPGERVSFSCRASQSIGTNIHWYQQRTNGSPRLLIKYASESISGIPSRFSGSGSGTDFTLSINSVESEDIADYYCQQNNNWPTTFGAGTKLELKRT

SEQ ID NO: 27404 - protein, 449 aa, Artificial Sequence
  Synthetic peptide
  MISC_FEATURE (1)..(24): Optional residues
  MISC_FEATURE (148)..(162): Optional residues
MGSHHHHHHGSGSENLYFQGSGGSDLGKKLLEAARAGQDDEVRILMANGADVNAKDEYGLTPLYLATAHGHLEIVEVLLKNGADVNAVDAIGFTPLHLAAFIGHLEIAEVLLKHGADVNAQDKFGKTAFDISIGNGNEDLAEILQKLNSGSGSGKPGQASGSELARKLLEASTKLQRLNIRLAEALLEAIARLQELNLELVYLAVELTDPKRIRDEIKEVKDKSKEIIRRAEKEIDDAAKESEKILEEAREAISGSGSELAKLLLKAIAETQDLNLRAAKAFLEAAAKLQELNIRAVELLVKLTDPATIREALEHAKRRSKEIIDEAERAIRAAKRESERIIEEARRLIEKGSGSGSELARELLRAHAQLQRLNLELLRELLRALAQLQELNLDLLRLASELTDEIWIAQELRRIGDEFNAYYADAERLIREAAAASEKISREAERLIR

SEQ ID NO: 27405 - protein, 481 aa, Artificial Sequence
  Synthetic peptide
  MISC_FEATURE (1)..(24): Optional residues
  MISC_FEATURE (181)..(194): Optional residues
MGSHHHHHHGSGSENLYFQGSGGSDLGKKLLEAARAGQDDEVRILMANGADVNADDTWGWTPLHLAAYQGHLEIVEVLLKNGADVNAYDYIGWTPLHLAADGHLEIVEVLLKNGADVNASDYIGDTPLHLAAHNGHLEIVEVLLKHGADVNAQDKFGKTAFDISIDNGNEDLAEILQKLNSGSGSGKPGQASGSELARKLLEASTKLQRLNIRLAEALLEAIARLQELNLELVYLAVELTDPKRIRDEIKEVKDKSKEIIRRAEKEIDDAAKESEKILEEAREAISGSGSELAKLLLKAIAETQDLNLRAAKAFLEAAAKLQELNIRAVELLVKLTDPATIREALEHAKRRSKEIIDEAERAIRAAKRESERIIEEARRLIEKGSGSGSELARELLRAHAQLQRLNLELLRELLRALAQLQELNLDLLRLASELTDEIWIAQELRRIGDEFNAYYADAERLIREAAAASEKISREAERLIR

SEQ ID NO: 27406 - protein, 483 aa, Artificial Sequence
  Synthetic peptide
  MISC_FEATURE (1)..(24): Optional residues
  MISC_FEATURE (183)..(196): Optional residues
MGSHHHHHHGSGSENLYFQGSGGSDLGKKLLEAARAGQDDEVRILVANGADVNAYFGTTPLHLAAAHGRLEIVEVLLKNGADVNAQDVWGITPLHLAAYNGHLEIVEVLLKYGADVNAHDTRGWTPLHLAAINGHLEIVEVLLKNVADVNAQDRSGKTPFDLAIDNGNEDIAEVLQKAAKLNSGSGSGKPGQASGSELARKLLEASTKLQRLNIRLAEALLEAIARLQELNLELVYLAVELTDPKRIRDEIKEVKDKSKEIIRRAEKEIDDAAKESEKILEEAREAISGSGSELAKLLLKAIAETQDLNLRAAKAFLEAAAKLQELNIRAVELLVKLTDPATIREALEHAKRRSKEIIDEAERAIRAAKRESERIIEEARRLIEKGSGSGSELARELLRAHAQLQRLNLELLRELLRALAQLQELNLDLLRLASELTDEIWIAQELRRIGDEFNAYYADAERLIREAAAASEKISREAERLIR

SEQ ID NO: 27407 - protein, 449 aa, Artificial Sequence
  Synthetic peptide
  MISC_FEATURE (1)..(24): Optional residues
  MISC_FEATURE (149)..(162): Optional residues
MGSHHHHHHGSGSENLYFQGSGGSDLGKKLLEAARAGQDDEVRILMANGADVNAKDEYGLTPLYLATAHGHLEIVEVLLKNGADVNAVDAIGFTPLHLAAFIGHLEIAEVLLKHGADVNAQDKFGKTAFDISIGNGNEDLAEILQKLNSGSGSGKPGQASGSELARKLLEASTKLQRLNIRLAEALLEAIARLQELNLELVYLAVELTDPKRIRDEIKEVKDKSKEIIRRAEKEIDDAAKESEKILEEAREAISGSGSELAKLLLKAIAETQDLNLRAAKAFLEAAAKLQELNIRAVELLVKLTDPATIREALEHAKRRSKEIIDEAERAIRAAKRESERIIEEARRLIEKGSGSGSELARELLRAHAQLQRLNLELLRELLRALAQLQELNLDLLRLASELTDEIWIAQELRRIGDEFNAYYADAERLIREAAAASEKISREAERLAR

SEQ ID NO: 27408 - protein, 449 aa, Artificial Sequence
  Synthetic peptide
  MISC_FEATURE (1)..(24): Optional residues
  MISC_FEATURE (149)..(162): Optional residues
MGSHHHHHHGSGSENLYFQGSGGSDLGKKLLEAARAGQDDEVRILMANGADVNAKDEYGLTPLYLATAHGHLEIVEVLLKNGADVNAVDAIGFTPLHLAAFIGHLEIAEVLLKHGADVNAQDKFGKTAFDISIGNGNEDLAEILQKLNSGSGSGKPGQASGSELARKLLEASTKLQRLNIRLAEALLEAIARLQELNLELVYLAVELTDPKRIRDEIKEVKDKSKEIIRRAEKEIDDAAKESEKILEEAREAISGSGSELAKLLLKAIAETQDLNLRAAKAFLEAAAKLQELNIRAVELLVKLTDPATIREALEHAKRRSKEIIDEAERAIRAAKRESERIIEEARRLIEKGSGSGSELARELLRAHAQLQRLNLELLRELLRALAQLQELNLDLLRLASELTDEIWIAQELRRIGDEFNAYYADAERLIREAAAASEKISREAERLSR

SEQ ID NO: 27409 - protein, 449 aa, Artificial Sequence
  Synthetic peptide
  MISC_FEATURE (1)..(24): Optional residues
  MISC_FEATURE (149)..(162): Optional residues
MGSHHHHHHGSGSENLYFQGSGGSDLGKKLLEAARAGQDDEVRILMANGADVNAKDEYGLTPLYLATAHGHLEIVEVLLKNGADVNAVDAIGFTPLHLAAFIGHLEIAEVLLKHGADVNAQDKFGKTAFDISIGNGNEDLAEILQKLNSGSGSGKPGQASGSELARKLLEASTKLQRLNIRLAEALLEAIARLQELNLELVYLAVELTDPKRIRDEIKEVKDKSKEIIRRAEKEIDDAAKESEKILEEAREAISGSGSELAKLLLKAIAETQDLNLRAAKAFLEAAAKLQELNIRAVELLVKLTDPATIREALEHAKRRSKEIIDEAERAIRAAKRESERIIEEARRLIEKGSGSGSELARELLRAHAQLQRLNLELLRELLRALAQLQELNLDLLRLASELTDEIWIAQELRRIGDEFNAYYADAERLSREAAAASEKISREAERLIR

SEQ ID NO: 27410 - protein, 449 aa, Artificial Sequence
  Synthetic peptide
  MISC_FEATURE (1)..(24): Optional residues
  MISC_FEATURE (149)..(162): Optional residues
MGSHHHHHHGSGSENLYFQGSGGSDLGKKLLEAARAGQDDEVRILMANGADVNAKDEYGLTPLYLATAHGHLEIVEVLLKNGADVNAVDAIGFTPLHLAAFIGHLEIAEVLLKHGADVNAQDKFGKTAFDISIGNGNEDLAEILQKLNSGSGSGKPGQASGSELARKLLEASTKLQRLNIRLAEALLEAIARLQELNLELVYLAVELTDPKRIRDEIKEVKDKSKEIIRRAEKEIDDAAKESEKILEEAREAISGSGSELAKLLLKAIAETQDLNLRAAKAFLEAAAKLQELNIRAVELLVKLTDPATIREALEHAKRRSKEIIDEAERAIRAAKRESERIIEEARRLIEKGSGSGSELARELLRAHAQLQRLNLELLRELLRALAQLQELNLDLLRLASELTDEIWIAQELRRIGDEFNAYYADAERLSREAAAASEKISREAERLAR

SEQ ID NO: 27411 - protein, 449 aa, Artificial Sequence
  Synthetic peptide
  MISC_FEATURE (1)..(24): Optional residues
  MISC_FEATURE (149)..(162): Optional residues
MGSHHHHHHGSGSENLYFQGSGGSDLGKKLLEAARAGQDDEVRILMANGADVNAKDEYGLTPLYLATAHGHLEIVEVLLKNGADVNAVDAIGFTPLHLAAFIGHLEIAEVLLKHGADVNAQDKFGKTAFDISIGNGNEDLAEILQKLNSGSGSGKPGQASGSELARKLLEASTKLQRLNIRLAEALLEAIARLQELNLELVYLAVELTDPKRIRDEIKEVKDKSKEIIRRAEKEIDDAAKESEKILEEAREAISGSGSELAKLLLKAIAETQDLNLRAAKAFLEAAAKLQELNIRAVELLVKLTDPATIREALEHAKRRSKEIIDEAERAIRAAKRESERIIEEARRLIEKGSGSGSELARELLRAHAQLQRLNLELLRELLRALAQLQELNLDLLRLASELTDEIWIAQELRRIGDEFNAYYADAERLSREAAAASEKISREAERLSR

SEQ ID NO: 27412 - protein, 449 aa, Artificial Sequence
  Synthetic peptide
  MISC_FEATURE (1)..(24): Optional residues
  MISC_FEATURE (149)..(162): Optional residues
MGSHHHHHHGSGSENLYFQGSGGSDLGKKLLEAARAGQDDEVRILMANGADVNAKDEYGLTPLYLATAHGHLEIVEVLLKNGADVNAVDAIGFTPLHLAAFIGHLEIAEVLLKHGADVNAQDKFGKTAFDISIGNGNEDLAEILQKLNSGSGSGKPGQASGSELARKLLEASTKLQRLNIRLAEALLEAIARLQELNLELVYLAVELTDPKRIRDEIKEVKDKSKEIIRRAEKEIDDAAKESEKILEEAREAISGSGSELAKLLLKAIAETQDLNLRAAKAFLEAAAKLQELNIRAVELLVKLTDPATIREALEHAKRRSKEIIDEAERAIRAAKRESERIIEEARRLIEKGSGSGSELARELLRAHAQAQRLNLELLRELLRALAQLQELNLDLLRLASELTDEIWIAQELRRIGDEFNAYYADAERLIREAAAASEKISREAERLIR

SEQ ID NO: 27413 - protein, 586 aa, Artificial Sequence
  Synthetic peptide
  MISC_FEATURE (1)..(43): Optional residues
  MISC_FEATURE (285)..(299): Optional residues
METDTLLLWVLLLWVPGSTGDYKDEHHHHHHGGSENLYFQGSGDIQMTQSPSSLSASVGDRVTITCRASQDVNTAVAWYQQKPGKAPKLLIYSASFLYSGVPSRFSGSRSGTDFTLTISSLQPEDFATYYCQQHYTTPPTFGQGTKVEIKGSTSGSGKPGSGEGSGEVQLVESGGGLVQPGGSLRLSCAASGFNIKDTYIHWVRQAPGKGLEWVARIYPTNGYTRYADSVKGRFTISADTSKNTAYLQMNSLRAEDTAVYYCSRWGGDGFYAMDYWGQGTLVTVSSGSGSGKPGQASGSELARKLLEASTKLQRLNIRLAEALLEAIARLQELNLELVYLAVELTDPKRIRDEIKEVKDKSKEIIRRAEKEIDDAAKESEKILEEAREAISGSGSELAKLLLKAIAETQDLNLRAAKAFLEAAAKLQELNIRAVELLVKLTDPATIREALEHAKRRSKEIIDEAERAIRAAKRESERIIEEARRLIEKGSGSGSELARELLRAHAQLQRLNLELLRELLRALAQLQELNLDLLRLASELTDEIWIAQELRRIGDEFNAYYADAERLSREAAAASEKISREAERLIR

SEQ ID NO: 27414 - protein, 449 aa, Artificial Sequence
  Synthetic peptide
  MISC_FEATURE (1)..(24): Optional residues
  MISC_FEATURE (149)..(162): Optional residues
MGSHHHHHHGSGSENLYFQGSGGSDLGKKLLEAARAGQDDEVRILMANGADVNAKDEYGLTPLYLATAHGHLEIVEVLLKNGADVNAVDAIGFTPLHLAAFIGHLEIAEVLLKHGADVNAQDKFGKTAFDISIGNGNEDLAEILQKLNSGSGSGKPGQASGSELARKLLEASTKLQRLNIRLAEALLEAIARLQELNLELVYLAVELTDPKRIRDEIKEVKDKSKEIIRRAEKEIDDAAKESEKILEEAREAISGSGSELAKLLLKAIAETQDLNLRAAKAFLEAAAKLQELNIRAVELLVKLTDPATIREALEHAKRRSKEIIDEAERAIRAAKRESERIIEEARRLIEKGSGSGSELARELLRAHAQAQRLNLEALRELLRALAQLQELNLDLLRLASELTDEIWIAQELRRIGDEFNAYYADAERLIREAAAASEKISREAERLIR

SEQ ID NO: 27415 - protein, 481 aa, Artificial Sequence
  Synthetic peptide
  MISC_FEATURE (1)..(24): Optional residues
  MISC_FEATURE (181)..(194): Optional residues
MGSHHHHHHGSGSENLYFQGSGGSDLGKKLLEAARAGQDDEVRILMANGADVNADDTWGWTPLHLAAYQGHLEIVEVLLKNGADVNAYDYIGWTPLHLAADGHLEIVEVLLKNGADVNASDYIGDTPLHLAAHNGHLEIVEVLLKHGADVNAQDKFGKTAFDISIDNGNEDLAEILQKLNSGSGSGKPGQASGSELARKLLEASTKLQRLNIRLAEALLEAIARLQELNLELVYLAVELTDPKRIRDEIKEVKDKSKEIIRRAEKEIDDAAKESEKILEEAREAISGSGSELAKLLLKAIAETQDLNLRAAKAFLEAAAKLQELNIRAVELLVKLTDPATIREALEHAKRRSKEIIDEAERAIRAAKRESERIIEEARRLIEKGSGSGSELARELLRAHAQLQRLNLELLRELLRALAQLQELNLDLLRLASELTDEIWIAQELRRIGDEFNAYYADAERLSREAAAASEKISREAERLIR

SEQ ID NO: 27416 - protein, 481 aa, Artificial Sequence
  Synthetic peptide
  MISC_FEATURE (1)..(24): Optional residues
  MISC_FEATURE (181)..(194): Optional residues
MGSHHHHHHGSGSENLYFQGSGGSDLGKKLLEAARAGQDDEVRILMANGADVNADDTWGWTPLHLAAYQGHLEIVEVLLKNGADVNAYDYIGWTPLHLAADGHLEIVEVLLKNGADVNASDYIGDTPLHLAAHNGHLEIVEVLLKHGADVNAQDKFGKTAFDISIDNGNEDLAEILQKLNSGSGSGKPGQASGSELARKLLEASTKLQRLNIRLAEALLEAIARLQELNLELVYLAVELTDPKRIRDEIKEVKDKSKEIIRRAEKEIDDAAKESEKILEEAREAISGSGSELAKLLLKAIAETQDLNLRAAKAFLEAAAKLQELNIRAVELLVKLTDPATIREALEHAKRRSKEIIDEAERAIRAAKRESERIIEEARRLIEKGSGSGSELARELLRAHAQLQRLNLELLRELLRALAQLQELNLDLLRLASELTDEIWIAQELRRIGDEFNAYYADAERLIREAAAASEKISREAERLAR

SEQ ID NO: 27417 - protein, 481 aa, Artificial Sequence
  Synthetic peptide
  MISC_FEATURE (1)..(24): Optional residues
  MISC_FEATURE (181)..(194): Optional residues
MGSHHHHHHGSGSENLYFQGSGGSDLGKKLLEAARAGQDDEVRILMANGADVNADDTWGWTPLHLAAYQGHLEIVEVLLKNGADVNAYDYIGWTPLHLAADGHLEIVEVLLKNGADVNASDYIGDTPLHLAAHNGHLEIVEVLLKHGADVNAQDKFGKTAFDISIDNGNEDLAEILQKLNSGSGSGKPGQASGSELARKLLEASTKLQRLNIRLAEALLEAIARLQELNLELVYLAVELTDPKRIRDEIKEVKDKSKEIIRRAEKEIDDAAKESEKILEEAREAISGSGSELAKLLLKAIAETQDLNLRAAKAFLEAAAKLQELNIRAVELLVKLTDPATIREALEHAKRRSKEIIDEAERAIRAAKRESERIIEEARRLIEKGSGSGSELARELLRAHAQAQRLNLELLRELLRALAQLQELNLDLLRLASELTDEIWIAQELRRIGDEFNAYYADAERLIREAAAASEKISREAERLIR

SEQ ID NO: 27418 - protein, 535 aa, Artificial Sequence
  Synthetic peptide
  MISC_FEATURE (1)..(24): Optional residues
  MISC_FEATURE (183)..(248): Optional residues
MGSHHHHHHGSGSENLYFQGSGGSDLGKKLLEAARAGQDDEVRILVANGADVNAYFGTTPLHLAAAHGRLEIVEVLLKNGADVNAQDVWGITPLHLAAYNGHLEIVEVLLKYGADVNAHDTRGWTPLHLAAINGHLEIVEVLLKNVADVNAQDRSGKTPFDLAIDNGNEDIAEVLQKAAKLNSGSGSGSGSGSGSGSGSGSGSGSGSGSGSGSGSGSGSGSGSGSGSGSGSGSGSGSGSGKPGQASGSELARKLLEASTKLQRLNIRLAEALLEAIARLQELNLELVYLAVELTDPKRIRDEIKEVKDKSKEIIRRAEKEIDDAAKESEKILEEAREAISGSGSELAKLLLKAIAETQDLNLRAAKAFLEAAAKLQELNIRAVELLVKLTDPATIREALEHAKRRSKEIIDEAERAIRAAKRESERIIEEARRLIEKGSGSGSELARELLRAHAQLQRLNLELLRELLRALAQLQELNLDLLRLASELTDEIWIAQELRRIGDEFNAYYADAERLSREAAAASEKISREAERLIR

SEQ ID NO: 27419 - protein, 483 aa, Artificial Sequence
  Synthetic peptide
  MISC_FEATURE (1)..(24): Optional residues
  MISC_FEATURE (183)..(196): Optional residues
MGSHHHHHHGSGSENLYFQGSGGSDLGKKLLEAARAGQDDEVRILVANGADVNAYFGTTPLHLAAAHGRLEIVEVLLKNGADVNAQDVWGITPLHLAAYNGHLEIVEVLLKYGADVNAHDTRGWTPLHLAAINGHLEIVEVLLKNVADVNAQDRSGKTPFDLAIDNGNEDIAEVLQKAAKLNSGSGSGKPGQASGSELARKLLEASTKLQRLNIRLAEALLEAIARLQELNLELVYLAVELTDPKRIRDEIKEVKDKSKEIIRRAEKEIDDAAKESEKILEEAREAISGSGSELAKLLLKAIAETQDLNLRAAKAFLEAAAKLQELNIRAVELLVKLTDPATIREALEHAKRRSKEIIDEAERAIRAAKRESERIIEEARRLIEKGSGSGSELARELLRAHAQLQRLNLELLRELLRALAQLQELNLDLLRLASELTDEIWIAQELRRIGDEFNAYYADAERLSREAAAASEKISREAERLIR

SEQ ID NO: 27420 - protein, 483 aa, Artificial Sequence
  Synthetic peptide
  MISC_FEATURE (1)..(24): Optional residues
  MISC_FEATURE (183)..(196): Optional residues
MGSHHHHHHGSGSENLYFQGSGGSDLGKKLLEAARAGQDDEVRILVANGADVNAYFGTTPLHLAAAHGRLEIVEVLLKNGADVNAQDVWGITPLHLAAYNGHLEIVEVLLKYGADVNAHDTRGWTPLHLAAINGHLEIVEVLLKNVADVNAQDRSGKTPFDLAIDNGNEDIAEVLQKAAKLNSGSGSGKPGQASGSELARKLLEASTKLQRLNIRLAEALLEAIARLQELNLELVYLAVELTDPKRIRDEIKEVKDKSKEIIRRAEKEIDDAAKESEKILEEAREAISGSGSELAKLLLKAIAETQDLNLRAAKAFLEAAAKLQELNIRAVELLVKLTDPATIREALEHAKRRSKEIIDEAERAIRAAKRESERIIEEARRLIEKGSGSGSELARELLRAHAQLQRLNLELLRELLRALAQLQELNLDLLRLASELTDEIWIAQELRRIGDEFNAYYADAERLIREAAAASEKISREAERLAR

SEQ ID NO: 27421 - protein, 483 aa, Artificial Sequence
  Synthetic peptide
  MISC_FEATURE (1)..(24): Optional residues
  MISC_FEATURE (183)..(196): Optional residues
MGSHHHHHHGSGSENLYFQGSGGSDLGKKLLEAARAGQDDEVRILVANGADVNAYFGTTPLHLAAAHGRLEIVEVLLKNGADVNAQDVWGITPLHLAAYNGHLEIVEVLLKYGADVNAHDTRGWTPLHLAAINGHLEIVEVLLKNVADVNAQDRSGKTPFDLAIDNGNEDIAEVLQKAAKLNSGSGSGKPGQASGSELARKLLEASTKLQRLNIRLAEALLEAIARLQELNLELVYLAVELTDPKRIRDEIKEVKDKSKEIIRRAEKEIDDAAKESEKILEEAREAISGSGSELAKLLLKAIAETQDLNLRAAKAFLEAAAKLQELNIRAVELLVKLTDPATIREALEHAKRRSKEIIDEAERAIRAAKRESERIIEEARRLIEKGSGSGSELARELLRAHAQAQRLNLELLRELLRALAQLQELNLDLLRLASELTDEIWIAQELRRIGDEFNAYYADAERLIREAAAASEKISREAERLIR

SEQ ID NO: 27422 - protein, 477 aa, Artificial Sequence
  Synthetic peptide
  MISC_FEATURE (1)..(24): Optional residues
  MISC_FEATURE (181)..(194): Optional residues
MGSHHHHHHGSGSENLYFQGSGGSDLGKKLLEAARAGQDDEVRILMANGADVNADDTWGWTPLHLAAYQGHLEIVEVLLKNGADVNAYDYIGWTPLHLAADGHLEIVEVLLKNGADVNASDYIGDTPLHLAAHNGHLEIVEVLLKHGADVNAQDKFGKTAFDISIDNGNEDLAEILQKLNSGSGSGKPGQASGSELARKLLEASTKLQRLNIRLAEALLEAIARLQELNLELVYLAVELTDPKRIRDEIKEVKDKSKEIIRRAEKEIDDAAKESEKILEEAREAISGSGSELAKLLLKAIAETQDLNLRAAKAFLEAAAKLQELNIRAVELLVKLTDPATIREALEHAKRRSKEIIDEAERAIRAAKRESERIIEEARRLIEKGSGSGSELARELLRAHAQLQRLNLELLRELLRALAQLQELNLDLLRLASELRDHMVLHEYVNAAGITFNAYYADAERLIREAAAASEKISREAG

SEQ ID NO: 27423 - protein, 478 aa, Artificial Sequence
  Synthetic peptide
  MISC_FEATURE (1)..(24): Optional residues
  MISC_FEATURE (181)..(194): Optional residues
MGSHHHHHHGSGSENLYFQGSGGSDLGKKLLEAARAGQDDEVRILMANGADVNADDTWGWTPLHLAAYQGHLEIVEVLLKNGADVNAYDYIGWTPLHLAADGHLEIVEVLLKNGADVNASDYIGDTPLHLAAHNGHLEIVEVLLKHGADVNAQDKFGKTAFDISIDNGNEDLAEILQKLNSGSGSGKPGQASGSELARKLLEASTKLQRLNIRLAEALLEAIARLQELNLELVYLAVELTDPKRIRDEIKEVKDKSKEIIRRAEKEIDDAAKESEKILEEAREAISGSGSELAKLLLKAIAETQDLNLRAAKAFLEAAAKLQELNIRAVELLVKLTDPATIREALEHAKRRSKEIIDEAERAIRAAKRESERIIEEARRLIEKGSGSGSELARELLRAHAQLQRLNLELLRELLRALAQLQELNLDLLRLASELGRDHMVLHEYVNAAGITFNAYYADAERLIREAAAASEKISREAG

SEQ ID NO: 27424 - protein, 477 aa, Artificial Sequence
  Synthetic peptide
  MISC_FEATURE (1)..(24): Optional residues
  MISC_FEATURE (181)..(194): Optional residues
MGSHHHHHHGSGSENLYFQGSGGSDLGKKLLEAARAGQDDEVRILMANGADVNADDTWGWTPLHLAAYQGHLEIVEVLLKNGADVNAYDYIGWTPLHLAADGHLEIVEVLLKNGADVNASDYIGDTPLHLAAHNGHLEIVEVLLKHGADVNAQDKFGKTAFDISIDNGNEDLAEILQKLNSGSGSGKPGQASGSELARKLLEASTKLQRLNIRLAEALLEAIARLQELNLELVYLAVELTDPKRIRDEIKEVKDKSKEIIRRAEKEIDDAAKESEKILEEAREAISGSGSELAKLLLKAIAETQDLNLRAAKAFLEAAAKLQELNIRAVELLVKLTDPATIREALEHAKRRSKEIIDEAERAIRAAKRESERIIEEARRLIEKGSGSGSELARELLRAHAQLQRLNLELLRELLRALAQLQELNLDLLRLASELRDHMVLHEYVNAAGITFNAYYADAERLSREAAAASEKISREAG

SEQ ID NO: 27425 - protein, 478 aa, Artificial Sequence
  Synthetic peptide
  MISC_FEATURE (1)..(24): Optional residues
  MISC_FEATURE (181)..(194): Optional residues
MGSHHHHHHGSGSENLYFQGSGGSDLGKKLLEAARAGQDDEVRILMANGADVNADDTWGWTPLHLAAYQGHLEIVEVLLKNGADVNAYDYIGWTPLHLAADGHLEIVEVLLKNGADVNASDYIGDTPLHLAAHNGHLEIVEVLLKHGADVNAQDKFGKTAFDISIDNGNEDLAEILQKLNSGSGSGKPGQASGSELARKLLEASTKLQRLNIRLAEALLEAIARLQELNLELVYLAVELTDPKRIRDEIKEVKDKSKEIIRRAEKEIDDAAKESEKILEEAREAISGSGSELAKLLLKAIAETQDLNLRAAKAFLEAAAKLQELNIRAVELLVKLTDPATIREALEHAKRRSKEIIDEAERAIRAAKRESERIIEEARRLIEKGSGSGSELARELLRAHAQLQRLNLELLRELLRALAQLQELNLDLLRLASELRDHMVLHEYVNAAGITFNAYYADAERLIREAAAASEKISREAER

SEQ ID NO: 27426 - protein, 481 aa, Artificial Sequence
  Synthetic peptide
  MISC_FEATURE (1)..(24): Optional residues
  MISC_FEATURE (181)..(194): Optional residues
MGSHHHHHHGSGSENLYFQGSGGSDLGKKLLEAARAGQDDEVRILMANGADVNADDTWGWTPLHLAAYQGHLEIVEVLLKNGADVNAYDYIGWTPLHLAADGHLEIVEVLLKNGADVNASDYIGDTPLHLAAHNGHLEIVEVLLKHGADVNAQDKFGKTAFDISIDNGNEDLAEILQKLNSGSGSGKPGQASGSELARKLLEASTKLQRLNIRLAEALLEAIARLQELNLELVYLAVELTDPKRIRDEIKEVKDKSKEIIRRAEKEIDDAAKESEKILEEAREAISGSGSELAKLLLKAIAETQDLNLRAAKAFLEAAAKLQELNIRAVELLVKLTDPATIREALEHAKRRSKEIIDEAERAIRAAKRESERIIEEARRLIEKGSGSGSELARELLRAHAQLQRLNLELLRELLRALAQLQELNLDLLRLASELTDPDEARKAIARVKRESNAYYADAERLSREAAAASEKISREAERLIR

SEQ ID NO: 27427 - protein, 482 aa, Artificial Sequence
  Synthetic peptide
  MISC_FEATURE (1)..(24): Optional residues
  MISC_FEATURE (181)..(194): Optional residues
MGSHHHHHHGSGSENLYFQGSGGSDLGKKLLEAARAGQDDEVRILMANGADVNADDTWGWTPLHLAAYQGHLEIVEVLLKNGADVNAYDYIGWTPLHLAADGHLEIVEVLLKNGADVNASDYIGDTPLHLAAHNGHLEIVEVLLKHGADVNAQDKFGKTAFDISIDNGNEDLAEILQKLNSGSGSGKPGQASGSELARKLLEASTKLQRLNIRLAEALLEAIARLQELNLELVYLAVELTDPKRIRDEIKEVKDKSKEIIRRAEKEIDDAAKESEKILEEAREAISGSGSELAKLLLKAIAETQDLNLRAAKAFLEAAAKLQELNIRAVELLVKLTDPATIREALEHAKRRSKEIIDEAERAIRAAKRESERIIEEARRLIEKGSGSGSELARELLRAHAQAQRLNLELLRELLRALAQLQELNLDLLRLASELGTDPDEARKAIARVKRESNAYYADAERLSREAAAASEKISREAERLIR

SEQ ID NO: 27428 - protein, 478 aa, Artificial Sequence
  Synthetic peptide
  MISC_FEATURE (1)..(24): Optional residues
  MISC_FEATURE (181)..(194): Optional residues
MGSHHHHHHGSGSENLYFQGSGGSDLGKKLLEAARAGQDDEVRILMANGADVNADDTWGWTPLHLAAYQGHLEIVEVLLKNGADVNAYDYIGWTPLHLAADGHLEIVEVLLKNGADVNASDYIGDTPLHLAAHNGHLEIVEVLLKHGADVNAQDKFGKTAFDISIDNGNEDLAEILQKLNSGSGSGKPGQASGSELARKLLEASTKLQRLNIRLAEALLEAIARLQELNLELVYLAVELTDPKRIRDEIKEVKDKSKEIIRRAEKEIDDAAKESEKILEEAREAISGSGSELAKLLLKAIAETQDLNLRAAKAFLEAAAKLQELNIRAVELLVKLTDPATIREALEHAKRRSKEIIDEAERAIRAAKRESERIIEEARRLIEKGSGSGSELARELLRAHAQLQRLNLELLRELLRALAQLQELNLDLLRLASELGTDPDEARKAIARVKRESNAYYADAERLSREAAAASEKISREAG

SEQ ID NO: 27429 - protein, 479 aa, Artificial Sequence
  Synthetic peptide
  MISC_FEATURE (1)..(24): Optional residues
  MISC_FEATURE (181)..(194): Optional residues
MGSHHHHHHGSGSENLYFQGSGGSDLGKKLLEAARAGQDDEVRILMANGADVNADDTWGWTPLHLAAYQGHLEIVEVLLKNGADVNAYDYIGWTPLHLAADGHLEIVEVLLKNGADVNASDYIGDTPLHLAAHNGHLEIVEVLLKHGADVNAQDKFGKTAFDISIDNGNEDLAEILQKLNSGSGSGKPGQASGSELARKLLEASTKLQRLNIRLAEALLEAIARLQELNLELVYLAVELTDPKRIRDEIKEVKDKSKEIIRRAEKEIDDAAKESEKILEEAREAISGSGSELAKLLLKAIAETQDLNLRAAKAFLEAAAKLQELNIRAVELLVKLTDPATIREALEHAKRRSKEIIDEAERAIRAAKRESERIIEEARRLIEKGSGSGSELARELLRAHAQLQRLNLELLRELLRALAQLQELNLDLLRLASELGTDPDEARKAIARVKRESNAYYADAERLSREAAAASEKISREAER

SEQ ID NO: 27430 - protein, 481 aa, Artificial Sequence
  Synthetic peptide
  MISC_FEATURE (1)..(24): Optional residues
  MISC_FEATURE (181)..(194): Optional residues
MGSHHHHHHGSGSENLYFQGSGGSDLGKKLLEAARAGQDDEVRILMANGADVNADDTWGWTPLHLAAYQGHLEIVEVLLKNGADVNAYDYIGWTPLHLAADGHLEIVEVLLKNGADVNASDYIGDTPLHLAAHNGHLEIVEVLLKHGADVNAQDKFGKTAFDISIDNGNEDLAEILQKLNSGSGSGKPGQASGSELARKLLEASTKLQRLNIRLAEALLEAIARLQELNLELVYLAVELTDPKRIRDEIKEVKDKSKEIIRRAEKEIDDAAKESEKILEEAREAISGSGSELAKLLLKAIAETQDLNLRAAKAFLEAAAKLQELNIRAVELLVKLTDPATIREALEHAKRRSKEIIDEAERAIRAAKRESERIIEEARRLIEKGSGSGSELARELLRAHAQLQRLNLELLRELLRALAQLQELNLDLLRLASELGTDPDEARKAIARVKRESNAYYADAERLSREAAAASEKISREAERLI

SEQ ID NO: 27431 - protein, 482 aa, Artificial Sequence
  Synthetic peptide
  MISC_FEATURE (1)..(24): Optional residues
  MISC_FEATURE (181)..(194): Optional residues
MGSHHHHHHGSGSENLYFQGSGGSDLGKKLLEAARAGQDDEVRILMANGADVNADDTWGWTPLHLAAYQGHLEIVEVLLKNGADVNAYDYIGWTPLHLAADGHLEIVEVLLKNGADVNASDYIGDTPLHLAAHNGHLEIVEVLLKHGADVNAQDKFGKTAFDISIDNGNEDLAEILQKLNSGSGSGKPGQASGSELARKLLEASTKLQRLNIRLAEALLEAIARLQELNLELVYLAVELTDPKRIRDEIKEVKDKSKEIIRRAEKEIDDAAKESEKILEEAREAISGSGSELAKLLLKAIAETQDLNLRAAKAFLEAAAKLQELNIRAVELLVKLTDPATIREALEHAKRRSKEIIDEAERAIRAAKRESERIIEEARRLIEKGSGSGSELARELLRAHAQLQRLNLELLRELLRALAQLQELNLDLLRLASELGTDPDEARKAIARVKRESNAYYADAERLSREAAAASEKISREAERLIR

SEQ ID NO: 27432 - protein, 482 aa, Artificial Sequence
  Synthetic peptide
  MISC_FEATURE (1)..(24): Optional residues
  MISC_FEATURE (181)..(194): Optional residues
MGSHHHHHHGSGSENLYFQGSGGSDLGKKLLEAARAGQDDEVRILMANGADVNADDTWGWTPLHLAAYQGHLEIVEVLLKNGADVNAYDYIGWTPLHLAADGHLEIVEVLLKNGADVNASDYIGDTPLHLAAHNGHLEIVEVLLKHGADVNAQDKFGKTAFDISIDNGNEDLAEILQKLNSGSGSGKPGQASGSELARKLLEASTKLQRLNIRLAEALLEAIARLQELNLELVYLAVELTDPKRIRDEIKEVKDKSKEIIRRAEKEIDDAAKESEKILEEAREAISGSGSELAKLLLKAIAETQDLNLRAAKAFLEAAAKLQELNIRAVELLVKLTDPATIREALEHAKRRSKEIIDEAERAIRAAKRESERIIEEARRLIEKGSGSGSELARELLRAHAQLQRLNLELLRELLRALAQLQELNLDLLRLASELGTDPDEARKAIARVKRESNAYYADAERLIREAAAASEKISREAERLIR

SEQ ID NO: 27433 - protein, 482 aa, Artificial Sequence
  Synthetic peptide
  MISC_FEATURE (1)..(24): Optional residues
  MISC_FEATURE (181)..(194): Optional residues
MGSHHHHHHGSGSENLYFQGSGGSDLGKKLLEAARAGQDDEVRILMANGADVNADDTWGWTPLHLAAYQGHLEIVEVLLKNGADVNAYDYIGWTPLHLAADGHLEIVEVLLKNGADVNASDYIGDTPLHLAAHNGHLEIVEVLLKHGADVNAQDKFGKTAFDISIDNGNEDLAEILQKLNSGSGSGKPGQASGSELARKLLEASTKLQRLNIRLAEALLEAIARLQELNLELVYLAVELTDPKRIRDEIKEVKDKSKEIIRRAEKEIDDAAKESEKILEEAREAISGSGSELAKLLLKAIAETQDLNLRAAKAFLEAAAKLQELNIRAVELLVKLTDPATIREALEHAKRRSKEIIDEAERAIRAAKRESERIIEEARRLIEKGSGSGSELARELLRAHAQLQRLNLELLRELLRALAQLQELNLDLLRLASELGTDPDEARKAIARVKRESNAYYADAERLSREAAAASEKISREAERLAR

SEQ ID NO: 27434 - protein, 482 aa, Artificial Sequence
  Synthetic peptide
  MISC_FEATURE (1)..(24): Optional residues
  MISC_FEATURE (181)..(194): Optional residues
MGSHHHHHHGSGSENLYFQGSGGSDLGKKLLEAARAGQDDEVRILMANGADVNADDTWGWTPLHLAAYQGHLEIVEVLLKNGADVNAYDYIGWTPLHLAADGHLEIVEVLLKNGADVNASDYIGDTPLHLAAHNGHLEIVEVLLKHGADVNAQDKFGKTAFDISIDNGNEDLAEILQKLNSGSGSGKPGQASGSELARKLLEASTKLQRLNIRLAEALLEAIARLQELNLELVYLAVELTDPKRIRDEIKEVKDKSKEIIRRAEKEIDDAAKESEKILEEAREAISGSGSELAKLLLKAIAETQDLNLRAAKAFLEAAAKLQELNIRAVELLVKLTDPATIREALEHAKRRSKEIIDEAERAIRAAKRESERIIEEARRLIEKGSGSGSELARELLRAHAQLQRLNLELLRELLRALAQLQELNLDLLRLASELGTDPDEARKAIARVKRESNAYYADAERLIREAAAASEKISREAERLAR

SEQ ID NO: 27435 - protein, 481 aa, Artificial Sequence
  Synthetic peptide
  MISC_FEATURE (1)..(24): Optional residues
  MISC_FEATURE (181)..(194): Optional residues
MGSHHHHHHGSGSENLYFQGSGGSDLGKKLLEAARAGQDDEVRILMANGADVNADDTWGWTPLHLAAYQGHLEIVEVLLKNGADVNAYDYIGWTPLHLAADGHLEIVEVLLKNGADVNASDYIGDTPLHLAAHNGHLEIVEVLLKHGADVNAQDKFGKTAFDISIDNGNEDLAEILQKLNSGSGSGKPGQASGSELARKLLEASTKLQRLNIRLAEALLEAIARLQELNLELVYLAVELTDPKRIRDEIKEVKDKSKEIIRRAEKEIDDAAKESEKILEEAREAISGSGSELAKLLLKAIAETQDLNLRAAKAFLEAAAKLQELNIRAVELLVKLTDPATIREALEHAKRRSKEIIDEAERAIRAAKRESERIIEEARRLIEKGSGSGSELARELLRAHAQLQRLNLELLRELLRALAQLQELNLDLLRLASELTDPDEARKAIARVKRESNAYYADAERLSREAAAASEKISREAERLAR

SEQ ID NO: 27436 - protein, 481 aa, Artificial Sequence; identical to SEQ ID NO: 27426
  Synthetic peptide
  MISC_FEATURE (1)..(24): Optional residues
  MISC_FEATURE (181)..(194): Optional residues

SEQ ID NO: 27437 - protein, 481 aa, Artificial Sequence
  Synthetic peptide
  MISC_FEATURE (1)..(24): Optional residues
  MISC_FEATURE (181)..(194): Optional residues
MGSHHHHHHGSGSENLYFQGSGGSDLGKKLLEAARAGQDDEVRILMANGADVNADDTWGWTPLHLAAYQGHLEIVEVLLKNGADVNAYDYIGWTPLHLAADGHLEIVEVLLKNGADVNASDYIGDTPLHLAAHNGHLEIVEVLLKHGADVNAQDKFGKTAFDISIDNGNEDLAEILQKLNSGSGSGKPGQASGSELARKLLEASTKLQRLNIRLAEALLEAIARLQELNLELVYLAVELTDPKRIRDEIKEVKDKSKEIIRRAEKEIDDAAKESEKILEEAREAISGSGSELAKLLLKAIAETQDLNLRAAKAFLEAAAKLQELNIRAVELLVKLTDPATIREALEHAKRRSKEIIDEAERAIRAAKRESERIIEEARRLIEKGSGSGSELARELLRAHAQLQRLNLELLRELLRALAQLQELNLDLLRLASELTDPDEARKAIARVKRESNAYYADAERLIREAAAASEKISREAERLIR

SEQ ID NO: 27438 - protein, 491 aa, Artificial Sequence
  Synthetic peptide
  MISC_FEATURE (1)..(24): Optional residues
  MISC_FEATURE (181)..(194): Optional residues
MGSHHHHHHGSGSENLYFQGSGGSDLGKKLLEAARAGQDDEVRILMANGADVNADDTWGWTPLHLAAYQGHLEIVEVLLKNGADVNAYDYIGWTPLHLAADGHLEIVEVLLKNGADVNASDYIGDTPLHLAAHNGHLEIVEVLLKHGADVNAQDKFGKTAFDISIDNGNEDLAEILQKLNSGSGSGKPGQASGSELARKLLEASTKLQRLNIRLAEALLEAIARLQELNLELVYLAVELTDPKRIRDEIKEVKDKSKEIIRRAEKEIDDAAKESEKILEEAREAISGSGSELAKLLLKAIAETQDLNLRAAKAFLEAAAKLQELNIRAVELLVKLTDPATIREALEHAKRRSKEIIDEAERAIRAAKRESERIIEEARRLIEKGSGSGSELARELLRAHAQLQRLNLELLRELLRALAQLQELNLDLLRLASELGSEDLYFQGSTDPDEARKAIARVKRESNAYYADAERLSREAAAASEKISREAERLAR

SEQ ID NO: 27439 - protein, 491 aa, Artificial Sequence
  Synthetic peptide
  MISC_FEATURE (1)..(24): Optional residues
  MISC_FEATURE (181)..(194): Optional residues
MGSHHHHHHGSGSENLYFQGSGGSDLGKKLLEAARAGQDDEVRILMANGADVNADDTWGWTPLHLAAYQGHLEIVEVLLKNGADVNAYDYIGWTPLHLAADGHLEIVEVLLKNGADVNASDYIGDTPLHLAAHNGHLEIVEVLLKHGADVNAQDKFGKTAFDISIDNGNEDLAEILQKLNSGSGSGKPGQASGSELARKLLEASTKLQRLNIRLAEALLEAIARLQELNLELVYLAVELTDPKRIRDEIKEVKDKSKEIIRRAEKEIDDAAKESEKILEEAREAISGSGSELAKLLLKAIAETQDLNLRAAKAFLEAAAKLQELNIRAVELLVKLTDPATIREALEHAKRRSKEIIDEAERAIRAAKRESERIIEEARRLIEKGSGSGSELARELLRAHAQLQRLNLELLRELLRALAQLQELNLDLLRLASELGSEDLYFQGSTDPDEARKAIARVKRESNAYYADAERLSREAAAASEKISREAERLIR

SEQ ID NO: 27440 - protein, 491 aa, Artificial Sequence
  Synthetic peptide
  MISC_FEATURE (1)..(24): Optional residues
  MISC_FEATURE (181)..(194): Optional residues
MGSHHHHHHGSGSENLYFQGSGGSDLGKKLLEAARAGQDDEVRILMANGADVNADDTWGWTPLHLAAYQGHLEIVEVLLKNGADVNAYDYIGWTPLHLAADGHLEIVEVLLKNGADVNASDYIGDTPLHLAAHNGHLEIVEVLLKHGADVNAQDKFGKTAFDISIDNGNEDLAEILQKLNSGSGSGKPGQASGSELARKLLEASTKLQRLNIRLAEALLEAIARLQELNLELVYLAVELTDPKRIRDEIKEVKDKSKEIIRRAEKEIDDAAKESEKILEEAREAISGSGSELAKLLLKAIAETQDLNLRAAKAFLEAAAKLQELNIRAVELLVKLTDPATIREALEHAKRRSKEIIDEAERAIRAAKRESERIIEEARRLIEKGSGSGSELARELLRAHAQLQRLNLELLRELLRALAQLQELNLDLLRLASELGSEDLYFQGSTDPDEARKAIARVKRESNAYYADAERLIREAAAASEKISREAERLAR

SEQ ID NO: 27441 - protein, 491 aa, Artificial Sequence
  Synthetic peptide
  MISC_FEATURE (1)..(24): Optional residues
  MISC_FEATURE (181)..(194): Optional residues
MGSHHHHHHGSGSENLYFQGSGGSDLGKKLLEAARAGQDDEVRILMANGADVNADDTWGWTPLHLAAYQGHLEIVEVLLKNGADVNAYDYIGWTPLHLAADGHLEIVEVLLKNGADVNASDYIGDTPLHLAAHNGHLEIVEVLLKHGADVNAQDKFGKTAFDISIDNGNEDLAEILQKLNSGSGSGKPGQASGSELARKLLEASTKLQRLNIRLAEALLEAIARLQELNLELVYLAVELTDPKRIRDEIKEVKDKSKEIIRRAEKEIDDAAKESEKILEEAREAISGSGSELAKLLLKAIAETQDLNLRAAKAFLEAAAKLQELNIRAVELLVKLTDPATIREALEHAKRRSKEIIDEAERAIRAAKRESERIIEEARRLIEKGSGSGSELARELLRAHAQLQRLNLELLRELLRALAQLQELNLDLLRLASELGSEDLYFQGSTDPDEARKAIARVKRESNAYYADAERLIREAAAASEKISREAERLIR

SEQ ID NO: 27442 - protein, 481 aa, Artificial Sequence; identical to SEQ ID NO: 27437
  Synthetic peptide
  MISC_FEATURE (1)..(24): Optional residues
  MISC_FEATURE (181)..(194): Optional residues

SEQ ID NO: 27443 - protein, 480 aa, Artificial Sequence
  Synthetic peptide
  MISC_FEATURE (1)..(24): Optional residues
  MISC_FEATURE (181)..(194): Optional residues
MGSHHHHHHGSGSENLYFQGSGGSDLGKKLLEAARAGQDDEVRILMANGADVNADDTWGWTPLHLAAYQGHLEIVEVLLKNGADVNAYDYIGWTPLHLAADGHLEIVEVLLKNGADVNASDYIGDTPLHLAAHNGHLEIVEVLLKHGADVNAQDKFGKTAFDISIDNGNEDLAEILQKLNSGSGSGKPGQASGSELARKLLEASTKLQRLNIRLAEALLEAIARLQELNLELVYLAVELTDPKRIRDEIKEVKDKSKEIIRRAEKEIDDAAKESEKILEEAREAISGSGSELAKLLLKAIAETQDLNLRAAKAFLEAAAKLQELNIRAVELLVKLTDPATIREALEHAKRRSKEIIDEAERAIRAAKRESERIIEEARRLIEKGSGSGSELARELLRAHAQLQRLNLELLRELLRALAQLQELNLDLLRLASELRDHMVLHEYVNAAGITFNAYYADAERLIREAAAASEKISREAERLI

SEQ ID NO: 27444 - protein, 481 aa, Artificial Sequence
  Synthetic peptide
  MISC_FEATURE (1)..(24): Optional residues
  MISC_FEATURE (181)..(194): Optional residues
MGSHHHHHHGSGSENLYFQGSGGSDLGKKLLEAARAGQDDEVRILMANGADVNADDTWGWTPLHLAAYQGHLEIVEVLLKNGADVNAYDYIGWTPLHLAADGHLEIVEVLLKNGADVNASDYIGDTPLHLAAHNGHLEIVEVLLKHGADVNAQDKFGKTAFDISIDNGNEDLAEILQKLNSGSGSGKPGQASGSELARKLLEASTKLQRLNIRLAEALLEAIARLQELNLELVYLAVELTDPKRIRDEIKEVKDKSKEIIRRAEKEIDDAAKESEKILEEAREAISGSGSELAKLLLKAIAETQDLNLRAAKAFLEAAAKLQELNIRAVELLVKLTDPATIREALEHAKRRSKEIIDEAERAIRAAKRESERIIEEARRLIEKGSGSGSELARELLRAHAQLQRLNLELLRELLRALAQLQELNLDLLRLASELRDHMVLHEYVNAAGITFNAYYADAERLIREAAAASEKISREAERLIR

SEQ ID NO: 27445 - protein, 482 aa, Artificial Sequence
  Synthetic peptide
  MISC_FEATURE (1)..(24): Optional residues
  MISC_FEATURE (181)..(194): Optional residues
MGSHHHHHHGSGSENLYFQGSGGSDLGKKLLEAARAGQDDEVRILMANGADVNADDTWGWTPLHLAAYQGHLEIVEVLLKNGADVNAYDYIGWTPLHLAADGHLEIVEVLLKNGADVNASDYIGDTPLHLAAHNGHLEIVEVLLKHGADVNAQDKFGKTAFDISIDNGNEDLAEILQKLNSGSGSGKPGQASGSELARKLLEASTKLQRLNIRLAEALLEAIARLQELNLELVYLAVELTDPKRIRDEIKEVKDKSKEIIRRAEKEIDDAAKESEKILEEAREAISGSGSELAKLLLKAIAETQDLNLRAAKAFLEAAAKLQELNIRAVELLVKLTDPATIREALEHAKRRSKEIIDEAERAIRAAKRESERIIEEARRLIEKGSGSGSELARELLRAHAQLQRLNLELLRELLRALAQLQELNLDLLRLASELGTDPDEARKAIARVKRESNAYYADAERLSREAAAASEKISREAERLSR

SEQ ID NO: 27446 - protein, 482 aa, Artificial Sequence
  Synthetic peptide
  MISC_FEATURE (1)..(24): Optional residues
  MISC_FEATURE (181)..(194): Optional residues
MGSHHHHHHGSGSENLYFQGSGGSDLGKKLLEAARAGQDDEVRILMANGADVNADDTWGWTPLHLAAYQGHLEIVEVLLKNGADVNAYDYIGWTPLHLAADGHLEIVEVLLKNGADVNASDYIGDTPLHLAAHNGHLEIVEVLLKHGADVNAQDKFGKTAFDISIDNGNEDLAEILQKLNSGSGSGKPGQASGSELARKLLEASTKLQRLNIRLAEALLEAIARLQELNLELVYLAVELTDPKRIRDEIKEVKDKSKEIIRRAEKEIDDAAKESEKILEEAREAISGSGSELAKLLLKAIAETQDLNLRAAKAFLEAAAKLQELNIRAVELLVKLTDPATIREALEHAKRRSKEIIDEAERAIRAAKRESERIIEEARRLIEKGSGSGSELARELLRAHAQLQRLNLEALRELLRALAQLQELNLDLLRLASELGTDPDEARKAIARVKRESNAYYADAERLSREAAAASEKISREAERLIR

SEQ ID NO: 27447 - protein, 17 aa, Artificial Sequence
  Synthetic peptide
RDHMVLHEYVNAAGITF

SEQ ID NO: 27448 - protein, 220 aa, Artificial Sequence
  Synthetic peptide
  MISC_FEATURE (1)..(33): Optional residues
  MISC_FEATURE (78)..(96): Optional residues
MGSHHHHHHGSGSENLYFQGSYPYDVPDYAGGSDEARKAIARVKRESKRIVEDAERLIREAAAASEKISREAERLIRGGGSGSGSGSGKPGQASGSDLGKKLLEAARAGQDDEVRILMANGADVNAKDEYGLTPLYLATAHGHLEIVEVLLKNGADVNAVDAIGFTPLHLAAFIGHLEIAEVLLKHGADVNAQDKFGKTAFDISIGNGNEDLAEILQKLN

SEQ ID NO: 27449 - protein, 243 aa, Artificial Sequence
  Synthetic peptide
  MISC_FEATURE (1)..(24): Optional residues
  MISC_FEATURE (69)..(87): Optional residues
MGSHHHHHHGSGSENLYFQGSGGSDEARKAIARVKRESKRIVEDAERLIREAAAASEKISREAERLIRGGGSGSGSGSGKPGQASGSDLGKKLLEAARAGQDDEVRILMANGADVNADDTWGWTPLHLAAYQGHLEIVEVLLKNGADVNAYDYIGWTPLHLAADGHLEIVEVLLKNGADVNASDYIGDTPLHLAAHNGHLEIVEVLLKHGADVNAQDKFGKTAFDISIDNGNEDLAEILQKLN

SEQ ID NO: 27450 - protein, 245 aa, Artificial Sequence
  Synthetic peptide
  MISC_FEATURE (1)..(24): Optional residues
  MISC_FEATURE (69)..(87): Optional residues
MGSHHHHHHGSGSENLYFQGSGGSDEARKAIARVKRESKRIVEDAERLIREAAAASEKISREAERLIRGGGSGSGSGSGKPGQASGSDLGKKLLEAARAGQDDEVRILVANGADVNAYFGTTPLHLAAAHGRLEIVEVLLKNGADVNAQDVWGITPLHLAAYNGHLEIVEVLLKYGADVNAHDTRGWTPLHLAAINGHLEIVEVLLKNVADVNAQDRSGKTPFDLAIDNGNEDIAEVLQKAAKLN

SEQ ID NO: 27451 - protein, 242 aa, Artificial Sequence
  Synthetic peptide
  MISC_FEATURE (1)..(24): Optional residues
  MISC_FEATURE (66)..(84): Optional residues
MGSHHHHHHGSGSENLYFQGSGGSDEAIARVKRESKRIVEDAERLIREAAAASEKISREAERLIRGGGSGSGSGSGKPGQASGSDLGKKLLEAARAGQDDEVRILVANGADVNAYFGTTPLHLAAAHGRLEIVEVLLKNGADVNAQDVWGITPLHLAAYNGHLEIVEVLLKYGADVNAHDTRGWTPLHLAAINGHLEIVEVLLKNVADVNAQDRSGKTPFDLAIDNGNEDIAEVLQKAAKLN

SEQ ID NO: 27452 - protein, 238 aa, Artificial Sequence
  Synthetic peptide
  MISC_FEATURE (1)..(24): Optional residues
  MISC_FEATURE (62)..(80): Optional residues
MGSHHHHHHGSGSENLYFQGSGGSDEVKRESKRIVEDAERLIREAAAASEKISREAERLIRGGGSGSGSGSGKPGQASGSDLGKKLLEAARAGQDDEVRILVANGADVNAYFGTTPLHLAAAHGRLEIVEVLLKNGADVNAQDVWGITPLHLAAYNGHLEIVEVLLKYGADVNAHDTRGWTPLHLAAINGHLEIVEVLLKNVADVNAQDRSGKTPFDLAIDNGNEDIAEVLQKAAKLN

SEQ ID NO: 27453 - protein, 238 aa, Artificial Sequence
  Synthetic peptide
  MISC_FEATURE (1)..(24): Optional residues
  MISC_FEATURE (62)..(80): Optional residues
MGSHHHHHHGSGSENLYFQGSGGSDEARKAIARVKRESKRIVEDAERLIREAAAASEKISRGGGSGSGSGSGKPGQASGSDLGKKLLEAARAGQDDEVRILVANGADVNAYFGTTPLHLAAAHGRLEIVEVLLKNGADVNAQDVWGITPLHLAAYNGHLEIVEVLLKYGADVNAHDTRGWTPLHLAAINGHLEIVEVLLKNVADVNAQDRSGKTPFDLAIDNGNEDIAEVLQKAAKLN

SEQ ID NO: 27454 - protein, 208 aa, Artificial Sequence
  Synthetic peptide
  MISC_FEATURE (1)..(24): Optional residues
  MISC_FEATURE (66)..(84): Optional residues
MGSHHHHHHGSGSENLYFQGSGGSDEAIARVKRESKRIVEDAERLIREAAAASEKISREAERLIRGGGSGSGSGSGKPGQASGSDLGKKLLEAARAGQDDEVRILMANGADVNAKDEYGLTPLYLATAHGHLEIVEVLLKNGADVNAVDAIGFTPLHLAAFIGHLEIAEVLLKHGADVNAQDKFGKTAFDISIGNGNEDLAEILQKLN

SEQ ID NO: 27455 - protein, 240 aa, Artificial Sequence
  Synthetic peptide
  MISC_FEATURE (1)..(24): Optional residues
  MISC_FEATURE (66)..(84): Optional residues
MGSHHHHHHGSGSENLYFQGSGGSDEAIARVKRESKRIVEDAERLIREAAAASEKISREAERLIRGGGSGSGSGSGKPGQASGSDLGKKLLEAARAGQDDEVRILMANGADVNADDTWGWTPLHLAAYQGHLEIVEVLLKNGADVNAYDYIGWTPLHLAADGHLEIVEVLLKNGADVNASDYIGDTPLHLAAHNGHLEIVEVLLKHGADVNAQDKFGKTAFDISIDNGNEDLAEILQKLN

SEQ ID NO: 27456 - protein, 350 aa, Artificial Sequence
  Synthetic peptide
  MISC_FEATURE (1)..(44): Optional residues
  MISC_FEATURE (89)..(107): Optional residues
METDTLLLWVLLLWVPGSTGDYKDEHHHHHHGGSENLYFQGSGSDEARKAIARVKRESKRIVEDAERLIREAAAASEKISREAERLIRGGGSGSGSGSGKPGQASGSQVQLKQSGPGLVQPSQSLSITCTVSGFSLTNYGVHWVRQSPGKGLEWLGVIWSGGNTDYNTPFTSRLSINKDNSKSQVFFKMNSLQSNDTAIYYCARALTYYDYEFAYWGQGTLVTVSAGGGGSGGGGSGGGGSDILLTQSPVILSVSPGERVSFSCRASQSIGTNIHWYQQRTNGSPRLLIKYASESISGIPSRFSGSGSGTDFTLSINSVESEDIADYYCQQNNNWPTTFGAGTKLELKRT

SEQ ID NO: 27457 - protein, 242 aa, Artificial Sequence
  Synthetic peptide
  MISC_FEATURE (1)..(24): Optional residues
  MISC_FEATURE (66)..(84): Optional residues
MGSHHHHHHGSGSENLYFQGSGGSDEARKAIARVKRESKRIVEDAERLIREAAAASEKISREAERGGGSGSGSGSGKPGQASGSDLGKKLLEAARAGQDDEVRILVANGADVNAYFGTTPLHLAAAHGRLEIVEVLLKNGADVNAQDVWGITPLHLAAYNGHLEIVEVLLKYGADVNAHDTRGWTPLHLAAINGHLEIVEVLLKNVADVNAQDRSGKTPFDLAIDNGNEDIAEVLQKAAKLN

SEQ ID NO: 27458 - protein, 245 aa, Artificial Sequence
  Synthetic peptide
  MISC_FEATURE (1)..(24): Optional residues
  MISC_FEATURE (69)..(87): Optional residues
MGSHHHHHHGSGSENLYFQGSGGSDEARKAIARVKRESKRIVEDAERLIREAAAASEKSSREAERLARGGGSGSGSGSGKPGQASGSDLGKKLLEAARAGQDDEVRILVANGADVNAYFGTTPLHLAAAHGRLEIVEVLLKNGADVNAQDVWGITPLHLAAYNGHLEIVEVLLKYGADVNAHDTRGWTPLHLAAINGHLEIVEVLLKNVADVNAQDRSGKTPFDLAIDNGNEDIAEVLQKAAKLN

SEQ ID NO: 27459 - protein, 409 aa, Artificial Sequence
  Synthetic peptide
  MISC_FEATURE (1)..(24): Optional residues
  MISC_FEATURE (69)..(87): Optional residues
  MISC_FEATURE (244)..(251): Optional residues
MGSHHHHHHGSGSENLYFQGSGGSDEARKAIARVKRESKRIVEDAERLIREAAAASEKISREAERLIRGGGSGSGSGSGKPGQASGSDLGKKLLEAARAGQDDEVRILMANGADVNADDTWGWTPLHLAAYQGHLEIVEVLLKNGADVNAYDYIGWTPLHLAADGHLEIVEVLLKNGADVNASDYIGDTPLHLAAHNGHLEIVEVLLKHGADVNAQDKFGKTAFDISIDNGNEDLAEILQKLNGGGSGGGSDLGKKLLEAARAGQDDEVRILVANGADVNAYFGTTPLHLAAAHGRLEIVEVLLKNGADVNAQDVWGITPLHLAAYNGHLEIVEVLLKYGADVNAHDTRGWTPLHLAAINGHLEIVEVLLKNVADVNAQDRSGKTPFDLAIDNGNEDIAEVLQKAAKLN

SEQ ID NO: 27460 - protein, 232 aa, Artificial Sequence
  Synthetic peptide
  MISC_FEATURE (1)..(24): Optional residues
MGSHHHHHHGSGSENLYFQGSGGSAHAGRTGYDNREIVMKYIHYKLSQRGYEWDAGDVGAAPPGAAPAPGIFSSQPGHTPHPAASRDPVARTSPLQTPAAPGAAAGPALSPVPPVVHLTLRQAGDDFSRRYRRDFAEMSSQLHLTPFTARGRFATVVEELFRDGVNWGRIVAFFEFGGVMCVESVNREMSPLVDNIALWMTEYLNRHLHTWIQDNGGWDAFVELYGPSMRGC

SEQ ID NO: 27461 - protein, 214 aa, Artificial Sequence
  Synthetic peptide
  MISC_FEATURE (1)..(1): Optional residue
MSKGEELFTGVVPILVELDGDVNGHKFSVRGEGEGDATIGKLTLKFICTTGKLPVPWPTLVTTLTYGVQCFSRYPDHMKRHDFFKSAMPEGYVQERTISFKDDGKYKTRAVVKFEGDTLVNRIELKGTDFKEDGNILGHKLEYNFNSHNVYITADKQKNGIKANFTVRHNVEDGSVQLADHYQQNTPIGDGPVLLPDNHYLSTQTVLSKDPNEK

SEQ ID NO: 27462 - protein, 165 aa, Artificial Sequence
  Synthetic peptide
AHAGRTGYDNREIVMKYIHYKLSQRGYEWDAGDDAEEGRTEAPEGTESEVVHLTLRQAGDDFSRRYRRDFAEMSSQLHLTPFTARGRFATVVEELFRDGVNWGRIVAFFEFGGVMCVESVNREMSPLVDNIALWMTEYLNRHLHTWIQDNGGWDAFVELYGPSMR

SEQ ID NO: 27463 - protein, 164 aa, Artificial Sequence
  Synthetic peptide
AHAGRTGYDNREIVMKYIHYKLSQRGYEWDAGDDAEEGSGSGSGTESEVVHLTLRQAGDDFSRRYRRDFAEMSSQLHLTPFTARGRFATVVEELFRDGVNWGRIVAFFEFGGVMCVESVNREMSPLVDNIALWMTEYLNRHLHTWIQDNGGWDAFVELYGPSMR

SEQ ID NO: 27464 - protein, 165 aa, Artificial Sequence
  Synthetic peptide
AHAGRTGYDNREIVMKYIHYKLSQRGYEWDAGDDAEEGRTEAPEGTESEVVHQTLRQAGDDFERRYRRDFSDMSSQLHLTPDTARGRFATVVEELFRDGVNWGRIVAFFEFGGVMCVESVNREMSPLVDRIADWMTEYLNRHLHPWIQDNGGWDAFVELYGPSMR

SEQ ID NO: 27465 - protein, 164 aa, Artificial Sequence
  Synthetic peptide
AHAGRTGYDNREIVMKYIHYKLSQRGYEWDAGDDAEEGSGSGSGTESEVVHQTLRQAGDDFERRYRRDFSDMSSQLHLTPDTARQRFATVVEELFRDGVNWGRIVAFFEFGGVMCVESVNREMSPLVDRIADWMTEYLNRHLHPWIQDNGGWDAFVELYGPSMR

SEQ ID NO: 27466 - protein, 165 aa, Artificial Sequence
  Synthetic peptide
AHAGRTGYDNREIVMKYIHYKLSQRGYEWDAGDDAEEGRTEAPEGTESEVVHQTLRQAGDDFERRYRRDFSDMSSQLHLTPDTARQRFATVVEELFRDGVNWGRIVAFFEFGGVMAVEMVNRGGSPLVDRIADWMTEYLNRHLHPWIQDNGGWDAFVELYGPSMR

SEQ ID NO: 27467 - protein, 164 aa, Artificial Sequence
  Synthetic peptide
AHAGRTGYDNREIVMKYIHYKLSQRGYEWDAGDDAEEGSGSGSGTESEVVHQTLRQAGDDFERRYRRDFSDMSSQLHLTPDTARQRFATVVEELFRDGVNWGRIVAFFEFGGVMAVEMVNRGGSPLVDRIADWMTEYLNRHLHPWIQDNGGWDAFVELYGPSMR

SEQ ID NO: 27468 - protein, 165 aa, Artificial Sequence
  Synthetic peptide
AHAGRTGYDNREIVMKYIHYKLSQRGYEWDAGDDAEENRTEAPEGTESEVVHRALRDAGDDFERRYRRDFAEMSSQLHLTPDTARQRFETVVEELFRDGVNWGRIVAFFEFGGVMCVESVNREMSPLVDNIAEWMTEYLNRHLHTWIQDNGGWDAFVELYGPSMR

SEQ ID NO: 27469 - protein, 164 aa, Artificial Sequence
  Synthetic peptide
AHAGRTGYDNREIVRKYIHYKLSQRGYEWDAGDDAEEGSGSGSGTESEVVHRALRDAGDDFERRYRRDFAEMSSQLHLTPDTARQRFETVVEELFRDGVNWGRIVAFFEFGGVMCVECVNREMSPLVDNIAEWMTEYLNRHLHTWIQDNGGWDAFVELYGPSMR

SEQ ID NO: 27470 - protein, 923 aa, Artificial Sequence
  Synthetic peptide
MELAALCRWGLLLALLPPGAASTQVCTGTDMKLRLPASPETHLDMLRHLYQGCQVVQGNLELTYLPTNASLSFLQDIQEVQGYVLIAHNQVRQVPLQRLRIVRGTQLFEDNYALAVLDNGDPLNNTTPVTGASPGGLRELQLRSLTEILKGGVLIQRNPQLCYQDTILWKDIFHKNNQLALTLIDTNRSRACHPCSPMCKGSRCWGESSEDCQSLTRTVCAGGCARCKGPLPTDCCHEQCAAGCTGPKHSDCLACLHFNHSGICELHCPALVTYNTDTFESMPNPEGRYTFGASCVTACPYNYLSTDVGSCTLVCPLHNQEVTAEDGTQRCEKCSKPCARVCYGLGMEHLREVRAVTSANIQEFAGCKKIFGSLAFLPESFDGDPASNTAPLQPEQLQVFETLEEITGYLYISAWPDSLPDLSVFQNLQVIRGRILHNGAYSLTLQGLGISWLGLRSLRELGSGLALIHHNTHLCFVHTVPWDQLFRNPHQALLHTANRPEDECVGEGLACHQLCARGHCWGPGPTQCVNCSQFLRGQECVEECRVLQGLPREYVNARHCLPCHPECQPQNGSVTCFGPEADQCVACAHYKDPPFCVARCPSGVKPDLSYMPIWKFPDEEGACQPCPINCTHSCVDLDDKGCPAEQRASPLTSIISAVVGILLVVVLGVVFGILIKRRQQKGGTMVSKGEELFTGVVPILVELDGDVNGHKFSVSGEGEGDATYGKLTLKFICTTGKLPVPWPTLVTTLTYGVQCFSRYPDHMKQHDFFKSAMPEGYVQERTIFFKDDGNYKTRAEVKFEGDTLVNRIELKGIDFKEDGNILGHKLEYNYNSHNVYIMADKQKNGIKVNFKIRHNIEDGSVQLADHYQQNTPIGDGPVLLPDNHYLSTQSALSKDPNEKRDHMVLLEFVTAAGITLGMDELYK

SEQ ID NO: 27471 - protein, 996 aa, Artificial Sequence
  Synthetic peptide
MRPSGTAGAALLALLAALCPASRALEEKKVCQGTSNKLTQLGTFEDHFLSLQRMFNNCEVVLGNLEITYVQRNYDLSFLKTIQEVAGYVLIALNTVERIPLENLQIIRGNMYYENSYALAVLSNYDANKTGLKELPMRNLQEILHGAVRFSNNPALCNVESIQWRDIVSSDFLSNMSMDFQNHLGSCQKCDPSCPNGSCWGAGEENCQKLTKIICAQQCSGRCRGKSPSDCCHNQCAAGCTGPRESDCLVCRKFRDEATCKDTCPPLMLYNPTTYQMDVNPEGKYSFGATCVKKCPRNYVVTDHGSCVRACGADSYEMEEDGVRKCKKCEGPCRKVCNGIGIGEFKDSLSINATNIKHFKNCTSISGDLHILPVAFRGDSFTHTPPLDPQELDILKTVKEITGFLLIQAWPENRTDLHAFENLEIIRGRTKQHGQFSLAVVSLNITSLGLRSLKEISDGDVIISGNKNLCYANTINWKKLFGTSGQKTKIISNRGENSCKATGQVCHALCSPEGCWGPEPRDCVSCRNVSRGRECVDKCNLLEGEPREFVENSECIQCHPECLPQAMNITCTGRGPDNCIQCAHYIDGPHCVKTCPAGVMGENNTLVWKYADAGHVCHLCHPNCTYGCTGPGLEGCPTNGPKIPSIATGMVGALLLLLVVALGIGLFMRRRHIVRKRGGTMAEGSVARQPDLLTCDDEPIHIPGAIQPHGLLLALAADMTIVAGSDNLPELTGLAIGALIGRSAADVFDSETHNRLTIALAEPGAAVGAPITVGFTMRKDAGFIGSWHRHDQLIFLELEPPQRDVAEPQAFFRRTNSAIRRLQAAETLESACAAAAQEVRKITGFDRVMIYRFASDFSGEVIAEDRCAEVESKLGLHYPASTVPAQARRLYTINPVRIIPDINYRPVPVTPDLNPVTGRPIDLSFAILRSVSPVHLEFMRNIGMHGTMSISILRGERLWGLIVCHHRTPYYVDLDGRQACELVAQVLAWQIGVMEE

SEQ ID NO: 27472 - protein, 336 aa, Artificial Sequence
  Synthetic peptide
METDTLLLWVLLLWVPGSTGDGSEIWIAQELRRIGDEFNAYYASGSGMVSKGEELFTGVVPILVELDGDVNGHKFSVSGEGEGDATYGKLTLKFICTTGKLPVPWPTLVTTLTYGVQCFSRYPDHMKQHDFFKSAMPEGYVQERTIFFKDDGNYKTRAEVKFEGDTLVNRIELKGIDFKEDGNILGHKLEYNYNSHNVYIMADKQKNGIKVNFKIRHNIEDGSVQLADHYQQNTPIGDGPVLLPDNHYLSTQSALSKDPNEKRDHMVLLEFVTAAGITLGMDELYKNAVGQDTQEVIVVPHSLPFKVVVISAILALVVLTIISLIILIMLWQKKPR

SEQ ID NO: 27473 - protein, 1255 aa, Artificial Sequence [sequence omitted]

SEQ ID NO: 27474 - protein, 1210 aa, Artificial Sequence [sequence omitted]

SEQ ID NO: 27475 - protein, 314 aa, Artificial Sequence
  Synthetic peptide
MAPPQVLAFGLLLAAATATFAAAQEECVCENYKLAVNCFVNNNRQCQCTSVGAQNTVICSKLAAKCLVMKAEMNGSKLGRRAKPEGALQNNDGLYDPDCDESGLFKAKQCNGTSTCWCVNTAGVRRTDKDTEITCSERVRTYWIIIELKHKAREKPYDSKSLRTALQKEITTRYQLDPKFITSILYENNVITIDLVQNSSQKTQNDVDIADVAYYFEKDVKGESLFHSKKMDLTVNGEQLDLDPGQTLIYYVDEKAPEFSMQGLKAGVIAVIVVVVIAVVAGIVVLVISRKKRMAKYEKAEIKEMGEMHRELNA

SEQ ID NO: 27476 - protein, 171 aa, Artificial Sequence
  Synthetic peptide
  MISC_FEATURE (1)..(21): Optional residues
MGSHHHHHHGSGSENLYFQGSTDEIWIAQELRRIGDEFNAYYASGSGDLGKKLLEAARAGQDDEVRILMANGADVNAKDEYGLTPLYLATAHGHLEIVEVLLKNGADVNAVDAIGFTPLHLAAFIGHLEIAEVLLKHGADVNAQDKFGKTAFDISIGNGNEDLAEILQKLN

SEQ ID NO: 27477 - protein, 203 aa, Artificial Sequence
  Synthetic peptide
  MISC_FEATURE (1)..(21): Optional residues
MGSHHHHHHGSGSENLYFQGSTDEIWIAQELRRIGDEFNAYYASGSGDLGKKLLEAARAGQDDEVRILMANGADVNADDTWGWTPLHLAAYQGHLEIVEVLLKNGADVNAYDYIGWTPLHLAADGHLEIVEVLLKNGADVNASDYIGDTPLHLAAHNGHLEIVEVLLKHGADVNAQDKFGKTAFDISIDNGNEDLAEILQKLN

SEQ ID NO: 27478 - protein, 205 aa, Artificial Sequence
  Synthetic peptide
  MISC_FEATURE (1)..(21): Optional residues
MGSHHHHHHGSGSENLYFQGSTDEIWIAQELRRIGDEFNAYYASGSGDLGKKLLEAARAGQDDEVRILVANGADVNAYFGTTPLHLAAAHGRLEIVEVLLKNGADVNAQDVWGITPLHLAAYNGHLEIVEVLLKYGADVNAHDTRGWTPLHLAAINGHLEIVEVLLKNVADVNAQDRSGKTPFDLAIDNGNEDIAEVLQKAAKLN

SEQ ID NO: 27479 - protein, 22 aa, Artificial Sequence
  Synthetic peptide
YKDEHHHHHHGGSENLYFQGSG

SEQ ID NO: 27480 - protein, 19 aa, Artificial Sequence
  Synthetic peptide
GGGSGSGSGSGKPGQASGS

SEQ ID NO: 27481 - protein, 12 aa, Artificial Sequence
  Synthetic peptide
GSGSGKPGQASG

SEQ ID NO: 27482 - protein, 3 aa, Artificial Sequence
  Synthetic peptide
GGS

SEQ ID NO: 27483 - protein, 14 aa, Artificial Sequence
  Synthetic peptide
SGSGSGKPGQASGS

SEQ ID NO: 27484 - protein, 9 aa, Artificial Sequence
  Synthetic peptide
YPYDVPDYA

SEQ ID NO: 27485 - protein, 4 aa, Artificial Sequence
  Synthetic peptide
SGSG

SEQ ID NO: 27486 - protein, 9 aa, Artificial Sequence
  Synthetic peptide
NWSHPQFEK

SEQ ID NO: 27487 - protein, 66 aa, Artificial Sequence
  Synthetic peptide
SGSGSGSGSGSGSGSGSGSGSGSGSGSGSGSGSGSGSGSGSGSGSGSGSGSGSGSGSGKPGQASGS

SEQ ID NO: 27488 - protein, 5 aa, Artificial Sequence
  Synthetic peptide
GGGGS

SEQ ID NO: 27489 - protein, 1001 aa, Artificial Sequence
  Synthetic peptide
METDTLLLWVLLLWVPGSTGDYKDEYPYDVPDYAGSAHAGRTGYDNREIVMKYIHYKLSQRGYEWDAGDDAEENRTEAPEGTESEVVHRALRDAGDDFERRYRRDFAEMSSQLHLTPDTARQRFETVVEELFRDGVNWGRIVAFFEFGGVMCVESVNREMSPLVDNIAEWMTEYLNRHLHTWIQDNGGWDAFVELYGPSMRGGGGSGGGGSESKYGPPCPPCPAPPVAGPSVFLFPPKPKDTLMISRTPEVTCVVVDVSQEDPEVQFNWYVDGVEVHNAKTKPREEQFQSTYRVVSVLTVLHQDWLNGKEYKCKVSNKGLPSSIEKTISKAKGQPREPQVYTLPPSQEEMTKNQVSLTCLVKGFYPSDIAVEWESNGQPENNYKTTPPVLDSDGSFFLYSRLTVDKSRWQEGNVFSCSVMHEALHNHYTQKSLSLSLGKMFWVLVVVGGVLACYSLLVTVAFIIFWVRSKRSRGGHSDYMNMTPRRPGPTRKHYQPYAPPRDFAAYRSRVKFSRSADAPAYQQGQNQLYNELNLGRREEYDVLDKRRGRDPEMGGKPRRKNPQEGLYNELQKDKMAEAYSEIGMKGERRRGKGHDGLYQGLSTATKDTYDALHMQALPPRLEGGGEGRGSLLTCGDVEENPGPRMLLLVTSLLLCELPHPAFLLIPRKVCNGIGIGEFKDSLSINATNIKHFKNCTSISGDLHILPVAFRGDSFTHTPPLDPQELDILKTVKEITGFLLIQAWPENRTDLHAFENLEIIRGRTKQHGQFSLAVVSLNITSLGLRSLKEISDGDVIISGNKNLCYANTINWKKLFGTSGQKTKIISNRGENSCKATGQVCHALCSPEGCWGPEPRDCVSCRNVSRGRECVDKCNLLEGEPREFVENSECIQCHPECLPQAMNITCTGRGPDNCIQCAHYIDGPHCVKTCPAGVMGENNTLVWKYADAGHVCHLCHPNCTYGCTGPGLEGCPTNGPKIPSIATGMVGALLLLLVVALGIGLFM
